(19) United States
(12) Patent Application Publication
(10) Pub. No.: US 2025/0025478 A1
(43) Pub. Date: Jan. 23, 2025

(54) METHODS OF TARGETING RNF213 SIGNALING PATHWAY FOR TREATING DISEASES

(71) Applicant: New York University, New York, NY (US)

(72) Inventors: Benjamin NEEL, New York, NY (US); Abhishek Bhardwaj, New York, NY (US)

(73) Assignee: New York University, New York, NY (US)

(21) Appl. No.: 18/763,300

(22) Filed: Jul. 3, 2024

Related U.S. Application Data
(60) Provisional application No. 63/524,807, filed on Jul. 3, 2023.

(51) Int. Cl. A61K 31/575; A61K 31/4439; A61K 31/506; A61K 45/06; A61P 35/00; C12N 15/113

(52) U.S. Cl. CPC A61K 31/575; A61K 31/4439; A61K 31/506; A61K 45/06; A61P 35/00; C12N 15/1137; C12N 2310/14; C12N 2310/531

(57) ABSTRACT

This application provides methods of inhibiting an inflammation- or hypoxia-induced death of a cell involving inhibiting an RNF213 signaling pathway. The application further provides methods of preventing or treating various diseases and disorders in a subject involving administering to the subject an inhibitor of expression of RNF213 protein or an inhibitor of one or more functions of the RNF213 protein. The application still further provides methods for enhancing the effectiveness of a cancer treatment in a subject where the cancer involves a hypoxic tumor microenvironment involving co-administering the cancer treatment with an inhibitor or activator of different functions of the RNF213 protein. The application also provides methods of eliminating drug-resistant tumor cells by co-administering an inhibitor of the expression of RNF213 protein or by inhibiting or activating specific functions of the RNF213 protein.

### CROSS-REFERENCE TO RELATED APPLICATIONS

[0001] This patent application claims priority to U.S. Provisional Application No. 63/524,807, filed on Jul. 3, 2023, the disclosure of which is herein incorporated by reference in its entirety.

### STATEMENT REGARDING FEDERALLY SPONSORED RESEARCH

[0002] This invention was made with government support under P30 CA016087, R01 CA264933, and R01 CA049152 awarded by the National Institutes of Health. The government has certain rights in the invention.

### SEQUENCE LISTING

[0003] The instant application contains a Sequence Listing which has been submitted electronically in XML format and is hereby incorporated by reference in its entirety. Said XML copy, created on Jun. 27, 2024, is named 243735_000376_SL.xml and is 4,502,680 bytes in size.

### FIELD OF THE DISCLOSURE

[0004] This application relates to methods of inhibiting an inflammation- or hypoxia-induced death of a cell involving inhibiting an RNF213 signaling pathway. The application further relates to methods of preventing or treating various diseases and disorders (e.g., vascular occlusive events or disorders, autoimmune or inflammatory diseases, diseases associated with lipotoxicity, liver damage, cancer) in a subject involving administering to the subject an inhibitor of expression of RNF213 protein or an inhibitor of one or more functions of the RNF213 protein. The application still further relates to methods for enhancing the effectiveness of a cancer treatment in a subject where the cancer involves a hypoxic tumor microenvironment involving co-administering the cancer treatment with an inhibitor or activator of different functions of the RNF213 protein. The application also relates to methods of eliminating drug-resistant tumor cells (a.k.a. drug-tolerant persister cells, DTPs) by co-administering an inhibitor of the expression of RNF213 protein or by inhibiting or activating specific functions of the RNF213 protein.

### BACKGROUND

[0005] Heart attack and stroke are the leading causes of death globally, often necessitating surgical intervention in addition to medications such as statins, thiazide diuretics, beta-blockers, and alpha-blockers to prevent further harm. Most drugs do not specifically target these conditions. Moyamoya disease (MMD) is a rare syndrome causing precocious strokes, often in teenagers and young adults, that are characterized by steno-occlusion of the carotid artery, a critical supplier of blood to the brain. MMD is also associated with more common types of steno-occlusive diseases and lipotoxicity. Currently, there is no effective medical treatment for MMD aside from complex surgical interventions. Single nucleotide polymorphisms (SNPs) in RNF213 are known to be associated with MMD. RNF213 is a giant (˜600 kDa) AAA-ATPase/ubiquitin ligase, which oligomerizes via its ATPase domains and has two potential E3 ubiquitin ligase domains (RING, RZ). RNF213 has been shown to protect the host against various pathogens through its oligomerized form and its RZ domain activity. Prior work has established that PTP1B negatively regulates the activity of RNF213 ubiquitin ligase activity and that loss of PTP1B regulation of RNF213 led to cell death in hypoxia. In particular PTP1B deficiency or inhibition can increase the death of HER2+ breast cancer cells maintained at ≤1% O₂. Most of the highly penetrant MMD SNPs reside within the RING domain of RNF213.

[0006] In HER2+ breast cancer, a common problem with current established HER2+ breast cancer treatment regimens is the emergence of drug-tolerant persisters (DTPs), which can seed tumor recurrence.

### SUMMARY OF THE INVENTION

[0007] As specified in the Background section above, there is a great need in the art for development of new therapeutic strategies for Moyamoya disease (MMD), as well as for patients with more conventional occlusive events (e.g., stroke, myocardial infarction, arterial thrombosis), diseases of lipotoxicity (e.g., hepatic steatosis), and cancer (e.g., HER2+ breast cancer). The present application addresses these and other needs.

[0008] In one aspect, provided herein is a method of inhibiting inflammatory cell death in a subject in need thereof, comprising inhibiting the RZ domain of RNF213 protein in the cells of the subject.

[0009] In another aspect, provided herein is a method of inhibiting inflammatory cell death in a subject in need thereof, comprising inhibiting a functional ATPase domain of RNF213 protein in the cells of the subject.

[0010] In another aspect, provided herein is a method of inhibiting inflammatory cell death in a subject in need thereof, comprising inhibiting RNF213 protein expression or degrading RNF213 protein in the cells of the subject.

[0011] In another aspect, provided herein is a method of inhibiting inflammatory cell death in a subject in need thereof, comprising activating the RING domain of RNF213 protein in the cells of the subject.

[0012] In another aspect, provided herein is a method of inhibiting inflammatory cell death in a subject in need thereof, comprising inhibiting oligomerization of RNF213 protein in the cells of the subject.

[0013] In another aspect, provided herein is a method of inhibiting inflammatory cell death in a subject in need thereof, comprising inhibiting an RNF213 activator in the cells of the subject.

[0014] In some embodiments of any of the above-described methods, the inflammatory cell death is pyroptotic cell death.

[0015] In another aspect, provided herein is a method of inhibiting hypoxia-induced cell death in a subject in need thereof, comprising inhibiting the RZ domain of RNF213 protein in the cells of the subject.

[0016] In another aspect, provided herein is a method of inhibiting hypoxia-induced cell death in a subject in need thereof, comprising inhibiting a functional ATPase domain of RNF213 protein in the cells of the subject.

[0017] In another aspect, provided herein is a method of inhibiting hypoxia-induced cell death in a subject in need thereof, comprising inhibiting RNF213 protein expression or degrading RNF213 protein in the cells of the subject.

[0018] In another aspect, provided herein is a method of inhibiting hypoxia-induced cell death in a subject in need thereof, comprising activating the RING domain of RNF213 protein in the cells of the subject.

[0019] In another aspect, provided herein is a method of inhibiting hypoxia-induced cell death in a subject in need thereof, comprising inhibiting oligomerization of RNF213 protein in the cells of the subject.

[0020] In another aspect, provided herein is a method of inhibiting hypoxia-induced cell death in a subject in need thereof, comprising inhibiting an RNF213 activator in the cells of the subject.

[0021] In another aspect, provided herein is a method of preventing or treating a vascular occlusive event or disorder in a subject in need thereof, comprising inhibiting the RZ domain of RNF213 protein in the cells of the subject.

[0022] In another aspect, provided herein is a method of preventing or treating a vascular occlusive event or disorder in a subject in need thereof, comprising inhibiting a functional ATPase domain of RNF213 protein in the cells of the subject.

[0023] In another aspect, provided herein is a method of preventing or treating a vascular occlusive event or disorder in a subject in need thereof, comprising inhibiting RNF213 protein expression or degrading RNF213 protein in the cells of the subject.

[0024] In another aspect, provided herein is a method of preventing or treating a vascular occlusive event or disorder in a subject in need thereof, comprising activating the RING domain of RNF213 protein in the cells of the subject.

[0025] In another aspect, provided herein is a method of preventing or treating a vascular occlusive event or disorder in a subject in need thereof, comprising inhibiting oligomerization of RNF213 protein in the cells of the subject.

[0026] In another aspect, provided herein is a method of preventing or treating a vascular occlusive event or disorder in a subject in need thereof, comprising inhibiting an RNF213 activator in the cells of the subject.

[0027] In some embodiments of any of the above-described methods, the vascular occlusive event or disorder is a stroke, myocardial infarction, arterial thrombosis, atherosclerosis, peripheral arterial disease, renal vascular disease, Moyamoya disease (MMD), or Moyamoya syndrome.

[0028] In another aspect, provided herein is a method of preventing or treating an autoimmune or inflammatory disease in a subject in need thereof, comprising inhibiting the RZ domain of RNF213 protein in the cells of the subject.

[0029] In another aspect, provided herein is a method of preventing or treating an autoimmune or inflammatory disease in a subject in need thereof, comprising inhibiting a functional ATPase domain of RNF213 protein in the cells of the subject.

[0030] In another aspect, provided herein is a method of preventing or treating an autoimmune or inflammatory disease in a subject in need thereof, comprising inhibiting RNF213 protein expression or degrading RNF213 protein in the cells of the subject.

[0031] In another aspect, provided herein is a method of preventing or treating an autoimmune or inflammatory disease in a subject in need thereof, comprising activating the RING domain of RNF213 protein in the cells of the subject.

[0032] In another aspect, provided herein is a method of preventing or treating an autoimmune or inflammatory disease in a subject in need thereof, comprising inhibiting oligomerization of RNF213 protein in the cells of the subject.

[0033] In another aspect, provided herein is a method of preventing or treating an autoimmune or inflammatory disease in a subject in need thereof, comprising inhibiting an RNF213 activator in the cells of the subject.

[0034] In some embodiments of any of the above-described methods, the autoimmune or inflammatory disease is Graves' disease, systemic lupus erythematosus, Sjögren's syndrome, multiple sclerosis, or rheumatoid arthritis.

[0035] In another aspect, provided herein is a method of preventing or treating a disease associated with lipotoxicity in a subject in need thereof, comprising inhibiting the RZ domain of RNF213 protein in the cells of the subject.

[0036] In another aspect, provided herein is a method of preventing or treating a disease associated with lipotoxicity in a subject in need thereof, comprising inhibiting a functional ATPase domain of RNF213 protein in the cells of the subject.

[0037] In another aspect, provided herein is a method of preventing or treating a disease associated with lipotoxicity in a subject in need thereof, comprising activating the RING domain of RNF213 protein in the cells of the subject.

[0038] In another aspect, provided herein is a method of preventing or treating a disease associated with lipotoxicity in a subject in need thereof, comprising inhibiting RNF213 protein expression or degrading RNF213 protein in the cells of the subject.

[0039] In another aspect, provided herein is a method of preventing or treating a disease associated with lipotoxicity in a subject in need thereof, comprising inhibiting oligomerization of RNF213 protein in the cells of the subject.

[0040] In another aspect, provided herein is a method of preventing or treating a disease associated with lipotoxicity in a subject in need thereof, comprising inhibiting an RNF213 activator in the cells of the subject.

[0041] In some embodiments of any of the above-described methods, the disease associated with lipotoxicity is hepatic steatosis, non-alcoholic steatohepatitis (NASH), non-alcoholic fatty liver disease (NAFLD), primary lipodystrophy, or secondary lipodystrophy.

[0042] In another aspect, provided herein is a method of preventing or limiting liver damage in a subject having hepatic steatosis, non-alcoholic steatohepatitis (NASH), non-alcoholic fatty liver disease (NAFLD), primary lipodystrophy, or secondary lipodystrophy, the method comprising inhibiting the RZ domain of RNF213 protein in the cells of the subject.

[0043] In another aspect, provided herein is a method of preventing or limiting liver damage in a subject having hepatic steatosis, non-alcoholic steatohepatitis (NASH), non-alcoholic fatty liver disease (NAFLD), primary lipodystrophy, or secondary lipodystrophy, the method comprising inhibiting a functional ATPase domain of RNF213 protein in the cells of the subject.

[0044] In another aspect, provided herein is a method of preventing or limiting liver damage in a subject having hepatic steatosis, non-alcoholic steatohepatitis (NASH), non-alcoholic fatty liver disease (NAFLD), primary lipodystrophy, or secondary lipodystrophy, the method comprising activating the RING domain of RNF213 protein in the cells of the subject.

[0045] In another aspect, provided herein is a method of preventing or limiting liver damage in a subject having hepatic steatosis, non-alcoholic steatohepatitis (NASH), non-alcoholic fatty liver disease (NAFLD), primary lipodystrophy, or secondary lipodystrophy, the method comprising inhibiting RNF213 protein expression or degrading RNF213 protein in the cells of the subject.

[0046] In another aspect, provided herein is a method of preventing or limiting liver damage in a subject having hepatic steatosis, non-alcoholic steatohepatitis (NASH), non-alcoholic fatty liver disease (NAFLD), primary lipodystrophy, or secondary lipodystrophy, the method comprising inhibiting oligomerization of RNF213 protein in the cells of the subject.

[0047] In another aspect, provided herein is a method of preventing or limiting liver damage in a subject having hepatic steatosis, non-alcoholic steatohepatitis (NASH), non-alcoholic fatty liver disease (NAFLD), primary lipodystrophy, or secondary lipodystrophy, the method comprising inhibiting an RNF213 activator in the cells of the subject.

[0048] In another aspect, provided herein is a method of preventing the generation of drug-tolerant persister cancer cells (DTPs) in a subject in need thereof who has been treated with a tyrosine kinase inhibitor (TKI), comprising inhibiting a functional ATPase domain of RNF213 protein in the cells of the subject.

[0049] In another aspect, provided herein is a method of preventing the generation of drug-tolerant persister cancer cells (DTPs) in a subject in need thereof who has been treated with a tyrosine kinase inhibitor (TKI), comprising inhibiting RNF213 protein expression or degrading RNF213 protein in the cells of the subject.

[0050] In another aspect, provided herein is a method of preventing the generation of drug-tolerant persister cancer cells (DTPs) in a subject in need thereof who has been treated with a tyrosine kinase inhibitor (TKI), comprising inhibiting the RING domain of RNF213 protein in the cells of the subject.

[0051] In another aspect, provided herein is a method of preventing the generation of drug-tolerant persister cancer cells (DTPs) in a subject in need thereof who has been treated with a tyrosine kinase inhibitor (TKI), comprising inhibiting oligomerization of RNF213 protein in the cells of the subject.

[0052] In another aspect, provided herein is a method of preventing the generation of drug-tolerant persister cancer cells (DTPs) in a subject in need thereof who has been treated with a tyrosine kinase inhibitor (TKI), comprising inhibiting an RNF213 activator in the cells of the subject.

[0053] In another aspect, provided herein is a method of sensitizing cancer cells to a tyrosine kinase inhibitor (TKI) in a subject in need thereof, comprising inhibiting a functional ATPase domain of RNF213 protein in the cells of the subject.

[0054] In another aspect, provided herein is a method of sensitizing cancer cells to a tyrosine kinase inhibitor (TKI) in a subject in need thereof, comprising inhibiting RNF213 protein expression or degrading RNF213 protein in the cells of the subject.

[0055] In another aspect, provided herein is a method of sensitizing cancer cells to a tyrosine kinase inhibitor (TKI) in a subject in need thereof, comprising inhibiting the RING domain of RNF213 protein in the cells of the subject.

[0056] In another aspect, provided herein is a method of sensitizing cancer cells to a tyrosine kinase inhibitor (TKI) in a subject in need thereof, comprising inhibiting oligomerization of RNF213 protein in the cells of the subject.

[0057] In another aspect, provided herein is a method of sensitizing cancer cells to a tyrosine kinase inhibitor (TKI) in a subject in need thereof, comprising inhibiting an RNF213 activator in the cells of the subject.

[0058] In another aspect, provided herein is a method of treating a cancer in a subject in need thereof or preventing recurrence of a cancer in a subject who has been treated with a targeted therapy, comprising activating the RZ domain of RNF213 protein in cancer cells of the subject.

[0059] In another aspect, provided herein is a method of treating a cancer in a subject in need thereof or preventing recurrence of a cancer in a subject who has been treated with a targeted therapy, comprising inhibiting a functional ATPase domain of RNF213 protein in cancer cells of the subject.

[0060] In another aspect, provided herein is a method of treating a cancer in a subject in need thereof or preventing recurrence of a cancer in a subject who has been treated with a a targeted therapy, comprising inhibiting the RING domain of RNF213 protein in cancer cells of the subject.

[0061] In another aspect, provided herein is a method of treating a cancer in a subject in need thereof or preventing recurrence of a cancer in a subject who has been treated with a targeted therapy, comprising inhibiting oligomerization of RNF213 protein in cancer cells of the subject.

[0062] In various embodiments, the tyrosine kinase inhibitor (TKI) is lapatinib, tucatinib, neratinib, afatinib, alectinib, axitinib, bosutinib, brigatinib, cabozantinib, ceritinib, crizotinib, dasatinib, entrectinib, erlotinib, gefitinib, imatinib, larotrectinib, lorlatinib, nilotinib, pazopanib, ponatinib, pyrotinib, regorafenib, sorafenib, sunitinib, or vandetanib, or a combination thereof. In some embodiments, the tyrosine kinase inhibitor (TKI) is lapatinib, tucatinib, or neratinib, or a combination thereof.

[0063] In various embodiments, the cells express human epidermal growth factor receptor 2 (HER2), HER4, epidermal growth factor receptor (EGFR), vascular endothelial growth factor receptor (VEGFR), platelet-derived growth factor receptor (PDGFR), rearranged during transfection (RET), c-ros oncogene 1 (ROS1), mesenchymal-epithelial transition factor (MET), tropomyosin receptor kinase (TRK), breakpoint cluster region-abelson murine leukemia viral oncogene homolog 1 (BCR-ABL), anaplastic lymphoma kinase (ALK), KIT proto-oncogene, receptor tyrosine kinase (KIT), sarcoma (Src) oncogene, or rapidly accelerated fibrosarcoma (RAF), or a combination thereof.

[0064] In various embodiments, the cancer is a breast cancer, a pancreatic cancer, a gastric cancer, a cervical cancer, a colorectal cancer, a head and neck cancer, a thyroid cancer, a prostate cancer, an ovarian cancer, non-small cell lung cancer (NSCLC), endometrial cancer, bladder cancer, melanoma, renal cell carcinoma, hepatocellular carcinoma, seminoma, gastrointestinal stromal tumor (GIST), glioblastoma, inflammatory myofibroblastic tumor (IMT), dermatofibrosarcoma protuberans, chronic myeloid leukemia (CML), or acute lymphoblastic leukemia (ALL). In some embodiments, the breast cancer is a human epidermal growth factor receptor 2 (HER2+) breast cancer.

[0065] In some embodiments of any of the above-described methods, the RNF213 activator is ABL1/2 or TNK1. In some embodiments, inhibiting ABL1/2 comprises administering to the subject an effective amount of asciminib, dasatinib, imatinib, AP 24149, ponatinib, ruserontinib, PD173952, bosutinib, rebastinib, olverembatinib, KW-2449, bafetinib, or nilotinib. In some embodiments, inhibiting TNK1 comprises administering to the subject an effective amount of TP-5801, TP-5801 TFA, XMD8-92, CZC-25146, or CZC-25146 hydrochloride.

[0066] In some embodiments of any of the above-described methods, degrading RNF213 protein comprises administering to the subject an effective amount of PROTAC or a molecular glue.

[0067] In some embodiments of any of the above-described methods, inhibiting RNF213 protein expression comprises administering to the subject an effective amount of an siRNA, an shRNA, an anti-sense oligonucleotide, or a site-specific nuclease.

[0068] In another aspect, provided herein is a method of treating a cancer in a subject in need thereof or preventing recurrence of a cancer in a subject who has been treated with a chemotherapy, radiotherapy, or a targeted therapy, comprising activating the RZ domain of RNF213 protein in cancer cells of the subject.

[0069] In another aspect, provided herein is a method of treating a cancer in a subject in need thereof or preventing recurrence of a cancer in a subject who has been treated with a chemotherapy, radiotherapy, or a targeted therapy, comprising activating a functional ATPase domain of RNF213 protein in cancer cells of the subject.

[0070] In another aspect, provided herein is a method of treating a cancer in a subject in need thereof or preventing recurrence of a cancer in a subject who has been treated with a chemotherapy, radiotherapy, or a targeted therapy, comprising inhibiting the RING domain of RNF213 protein in cancer cells of the subject.

[0071] In another aspect, provided herein is a method of treating a cancer in a subject in need thereof or preventing recurrence of a cancer in a subject who has been treated with a chemotherapy, radiotherapy, or a targeted therapy, comprising promoting oligomerization of RNF213 protein in cancer cells of the subject.

[0072] In another aspect, provided herein is a method for eliminating hypoxic tumor cells in a subject in need thereof, comprising activating the RZ domain of RNF213 protein in the tumor cells of the subject.

[0073] In another aspect, provided herein is a method for eliminating hypoxic tumor cells in a subject in need thereof, comprising activating a functional ATPase domain of RNF213 protein in the tumor cells of the subject.

[0074] In another aspect, provided herein is a method for eliminating hypoxic tumor cells in a subject in need thereof, comprising inhibiting the RING domain of RNF213 protein in the tumor cells of the subject.

[0075] In another aspect, provided herein is a method for eliminating hypoxic tumor cells in a subject in need thereof, comprising promoting oligomerization of RNF213 protein in the tumor cells of the subject.

[0076] In another aspect, provided herein is a method for enhancing effectiveness of an anti-cancer treatment in a subject in need thereof, comprising co-administering the anti-cancer treatment with an effective amount of an activator of the RZ domain of RNF213 protein. In some embodiments, co-administering comprises administering to the subject the anti-cancer treatment and an activator of the RZ domain of RNF213 protein simultaneously in one composition or in separate compositions. In some embodiments, co-administering comprises administering the anti-cancer treatment and an activator of the RZ domain of RNF213 protein sequentially, in any order.

[0077] In another aspect, provided herein is a method for enhancing effectiveness of an anti-cancer treatment in a subject in need thereof, comprising co-administering the anti-cancer treatment with an effective amount of an activator of a functional ATPase domain of RNF213 protein. In some embodiments, co-administering comprises administering the anti-cancer treatment and the activator of the functional ATPase domain of RNF213 protein simultaneously in one composition or in separate compositions. In some embodiments, co-administering comprises administering the anti-cancer treatment and the activator of the functional ATPase domain of RNF213 protein sequentially, in any order.

[0078] In another aspect, provided herein is a method for enhancing effectiveness of an anti-cancer treatment in a subject in need thereof, comprising co-administering the anti-cancer treatment with an effective amount of an inhibitor of the RING domain of RNF213 protein. In some embodiments, co-administering comprises administering the anti-cancer treatment and an inhibitor of the RING domain of RNF213 protein simultaneously in one composition or in separate compositions. In some embodiments, co-administering comprises administering the anti-cancer treatment and an inhibitor of the RING domain of RNF213 protein sequentially, in any order.

[0079] In another aspect, provided herein is a method for enhancing effectiveness of an anti-cancer treatment in a subject in need thereof, comprising co-administering the anti-cancer treatment with an effective amount of a compound promoting oligomerization of RNF213 protein in cancer cells of the subject. In some embodiments, co-administering comprises administering the anti-cancer treatment and the compound promoting oligomerization of RNF213 protein simultaneously in one composition or in separate compositions. In some embodiments, co-administering comprises administering the anti-cancer treatment and the compound promoting oligomerization of RNF213 protein sequentially, in any order.

[0080] In some embodiments of any of the above-described methods, the anti-cancer treatment is a chemotherapy, targeted therapy, or antibody-drug conjugate (ADC) treatment.

[0081] In some embodiments of any of the above-described methods, the cancer is a breast cancer, pancreatic cancer, or cervical cancer. In some embodiments, the breast cancer is a HER2+ breast cancer.

[0082] In some embodiments of any of the above-described methods, the cancer has significant regions of hypoxia.

[0083] In some embodiments of any of the above-described methods, the functional ATPase domain of RNF213 protein is the 3rd or 4th ATPase domain.

[0084] In some embodiments of any of the above-described methods, an activator of a functional ATPase domain is a PTP1B inhibitor.

[0085] In some embodiments of any of the above-described methods, the subject is human.

### BRIEF DESCRIPTION OF THE DRAWINGS

[0086] The patent or application file contains at least one drawing executed in color. Copies of this patent or patent application publication with color drawing(s) will be provided by the Office upon request and payment of the necessary fee.

[0087] FIGS. 1A-1H show RNF213 phosphorylation at Y1275 is regulated by PTP1B and ABL1/2 and controls oligomerization. In FIG. 1A RNF213 Y1275 phosphorylation regulates interaction with PTP1B substrate-trapping mutant. BT474 RNF213-KO-PTPN1-KD cells, with or without stable expression of a doxycycline (Dox)-inducible, HA-tagged substrate trapping mutant (D181A) of mouse PTP1B (HA-Ptpn1^{D/A}), were transiently transfected with 3×-FLAG-RNF213 or 3×-FLAG-RNF213^{Y1275F} and exposed to 0.5 μg/ml Dox (+) or left untreated (−). Lysates (left panel) were subjected to anti-HA immunoprecipitation and immunoblotting for the indicated proteins (right panel). ERK2 serves as a loading control. In FIG. 1B, Y1275 is phosphorylated in BT474 cells. BT474 RNF213-KO-PTPN1-KD cells were transiently transfected with 3×-FLAG-RNF213 or 3×-FLAG-RNF213^{Y1275F}. Lysates were subjected to anti-FLAG immunoprecipitation and immunoblotting, as indicated, and pY/FLAG signal (each in arbitrary units) was quantified. In FIG. 1C, Y1275 phosphorylation promotes RNF213 oligomerization. BT474 RNF213-KO-PTPN1-KD cells were transiently transfected with GFP-RNF213 and 3×-FLAG-RNF213 or 3×-FLAG-RNF213^{Y1275F}. Lysates were subjected to anti-FLAG immunoprecipitation/immunoblotting. Vinculin serves as a loading control. In FIG. 1D, ABL kinases promote RNF213-mediated hypoxia hypersensitivity. BT474 and BT474 PTPN1-KO cells were treated with the indicated kinase inhibitors. Cells were subjected to 0.1% O₂ for 55 hours, and viable cells were counted. Error bars represent ±S.E.M. In FIG. 1E, Dasatinib inhibits RNF213-PTPTB interaction. BT474 RNF213-KO-PTPN1-KD cells expressing substrate trapping mutant HA-Ptpn1^{D/A} were transiently transfected with 3×-FLAG-RNF213 and then treated with dasatinib or vehicle (DMSO) for 24 hours. Cell lysates were subjected to anti-HA immunoprecipitation/immunoblotting. In FIG. 1F, Dasatinib inhibits tyrosine phosphorylation of RNF213. BT474 RNF213-KO-PTPN1-KD cells were transiently transfected with 3×-FLAG-RNF213 followed by treatment with DMSO or dasatinib for 24 hours, and lysates were subjected to anti-FLAG immunoprecipitation/immunoblotting. In FIG. 1G, ABL phosphorylates RNF213 on Y1275. 3×-FLAG-RNF213 and 3×-FLAG-RNF213^{Y1275F} were purified and phosphorylated in vitro with the indicated amounts of recombinant ABL1. In FIG. 1H, ABL1/ABL2 promotes RNF213 mediated hypoxia hypersensitivity in PTPN1-KO cells. BT474 and BT474 PTPN1-KO cells were transfected with ABL1 and/or ABL2 siRNAs targeting or control non-targeting siRNA. Cells were subjected to 0.1% O₂ for 55 hours, and viable cells were counted (top panel). Error bars represent ±S.E.M. Bottom panel shows immunoblots for the indicated proteins. All experiments (FIGS. 1A-1G) are representative results from three independent experiments except for the quantifications in FIGS. 1B, 1D, 1F, and 1H, which are pooled data from the triplicates. Panels FIGS. 1B and 1F were analyzed by ratio paired two-tailed t-test; all other results were evaluated by two-way ANOVA (analysis of variance), *P<0.05, ****P<0.0001, ns=non-specific band.

[0088] FIGS. 2A-2F illustrate RNF213 interacts with CYLD/SPATA2. FIG. 2A is a schematic showing proximity-based labelling of RNF213 interactors. HeLa FlpIn-TRex cells expressing TurboID (control), TurboID-RNF213 (N-Turbo) or RNF213-TurboID (C-Turbo) were used for proximity-based biotin labeling. FIG. 2B is a one-sided volcano plot showing the fold-change and SAINT score of proteins identified in C-Turbo versus Control Turbo. Proteins with a SAINT Score >5% FDR are highlighted and considered to be potential interacting partners of RNF213. FIG. 2C shows that CYLD and SPATA2 are in proximity with RNF213. Lysates prepared as in FIG. 2A were subjected to streptavidin affinity purification and immunoblotting for the indicated proteins. FIG. 2D shows that CYLD and SPATA2 interact with RNF213. BT474 RNF213-KO-PTPN1-KD cells were transiently transfected with 3×-FLAG-RNF213, and lysates were subjected to immunoprecipitation and immunoblotting as indicated. FIGS. 2E and 2F show CYLD and SPATA2 protect against hypoxia hypersensitivity. BT474 and BT474 PTPN1-KO cells, with or without CYLD, were subjected to 0.1% O₂ for indicated times, and viable cells were counted (top panel). Immunoblots (bottom panels) show absence of CYLD/SPATA2 in stable pools generated with the indicated sgRNAs. Error bars represent ±S.E.M. FIGS. 2B, 2E, and 2F are pooled results from three biological replicates; all other data are representative of these replicates, ****P<0.0001, two-way ANOVA.

[0089] FIGS. 3A-3E demonstrate the role of RNF213 RZ and RING domains in CYLD and SPATA2 ubiquitylation. FIG. 3A illustrates that RNF213 promotes SPATA2 and CYLD ubiquitylation. BT474 and BT474 RNF213-KO cells were co-transfected with expression constructs for HA-ubiquitin (HA-UB) and ALFA-SPATA2 or ALFA-CYLD and treated with claramine or vehicle (−), as indicated. Lysates (left panel) were subjected to anti-ALFA immunoprecipitation/immunoblotting (right panel). FIGS. 3B-3E demonstrate opposing actions of RNF213 RZ and RING domains in CYLD and SPATA2 ubiquitylation. Purified wild type or mutant 3×-FLAG-RNF213 was added to in vitro ubiquitylation assays with UBE2L3, CYLD, and/or SPATA2 and immunoblotted, as indicated. Each blot is representative of two biological replicates, ns=non-specific band.

[0090] FIGS. 4A-4E demonstrate RNF213 RING mutants/highly penetrant MMD SNPs activate RZ domain and require ATPase activity. In FIGS. 4A-4D, BT474 RNF213-KO cell reconstituted with RNF213^{WT}, the indicated RNF213 mutants, parental BT474 cells, and BT474 RNF213-KO cells with or without PTP1B, were subjected to 0.1% O₂ for 40 hours. Immunoblotting was performed for the indicated proteins. In FIG. 4E, RZ and ATPase domains of RNF213 are required for hypoxia hypersensitivity of BT474 PTPN1-KO cells. Cells prepared as in FIGS. 4A-4D were subjected to 0.1% O₂, and viable cells were counted after 55 hours. Error bars represent ±S.E.M. (n=3 biological replicates, each panel) and each blot is representative of two biological replicates. ****P<0.0001, two-way ANOVA, ns=non-specific band.

[0091] FIGS. 5A-5H illustrate PTPN1-KO cells dying via RNF213- and LUBAC-dependent pyroptosis. FIG. 5A shows that wild-type, but not RING-dead RNF213 requires LUBAC for CYLD/SPATA2 degradation. BT474 RNF213-KO cells reconstituted with wild-type RNF213 or RNF213^{H4014A} parental BT474 cells and BT474 RNF213-KO with or without PTP1B were transfected with RBCK1 or control siRNA. Cells were subjected to 0.1% 02 for 40 hours, lysed, and, immunoblotted as indicated (top panel). RBCK1 knockdown was confirmed by RT-qPCR (bottom panel). In FIG. 5B, RING-dead RNF213 bypasses LUBAC requirement. The indicated cells were subjected to 0.1% O₂ for 55 hours, and viable cell numbers were counted. FIG. 5C shows that RNF213 promotes NF-κB activity. Cells described in FIG. 4E were transfected with an NF-κB reporter construct and subjected to 0.1% O₂ for 48 hours. Firefly and Renilla luciferase signals were measured, reporter activity was quantified as the ratio of Firefly/Renilla signal, and all other signals were normalized to that from parental BT474 cells. FIG. 5D shows hypoxic cell death in PTPN1-KO cells is caspase-dependent. BT474 and BT474 PTPN1-KO cells were treated with the indicated inhibitors, placed in 0.1% O₂ for 55 hours, and cell viability was assessed. FIGS. 5E and 5F provide hypoxic cell death in PTPN1-KO cells requires inflammatory caspases and the inflammasome, as in FIG. 5D, except with/without VX765 (FIG. 5E) or MCC950 (FIG. 5F). FIG. 5G shows GSDMD promotes hypoxic cell death of PTPN1-KO cells. Pools of BT474 and BT474 PTPN1-KO cells, with or without GSDMD deletion, were subjected to 0.1% O₂, and cell viability was measured at 55 hours (top panel). Immunoblot indicates efficiency of GSDMD knockout (bottom panel). FIG. 5H shows hypoxia-hypersensitive cells release IL-10. Cells prepared as in FIG. 4E were subjected to 0.1% O₂ for 55 hours, and IL-1β in supernatants was quantified by immunoassay. In all panels, error bars represent ±S.E.M. (n=3 biological replicates) and each blot is representative of two biological replicates. ****P<0.0001, two-way ANOVA, ns=non-specific band.

[0092] FIGS. 6A-6I show hypoxia-evoked ER stress activates the inflammasome for RNF213-triggered pyroptosis, in accordance with an exemplary embodiment of the present disclosure. FIGS. 6A and 6B show that ER stress promotes hypoxia hypersensitivity. BT474 and BT474 PTPN1-KO cells treated with the IRE1α inhibitor 4μ8C (FIG. 6A) or the PERK inhibitor GSK2606414 (FIG. 6B), were subjected to 0.1% 02 for 55 hours, and viability was assessed. FIG. 6C demonstrates that ER stress causes pyroptosis in CYLD/SPATA2-deficient cells in normoxia. BT474 cells, with or without CYLD/SPATA2, were treated with tunicamycin (10 μM) or thapsigargin (5 μM) for 40 hours, and cell viability was measured at 40 hours. Parental and PTPN1-KO BT474 cells, with or without CYLD- or NLRP3-KO, were injected subcutaneously into athymic nu nu mice (6/group) (FIGS. 6D and 6E). Tumor size was measured weekly for 9 weeks (FIG. 6D). Residual tumors were excised, fixed, and stained with H&E (FIG. 6E). RNF213-KO-sgPTPN1 BT474 cells were stably reconstituted with inducible vectors expressing WT RNF213 or the indicated RNF213 mutants and implanted into athymic nu nu mice (6/group) (FIGS. 6F and 6G). When tumors reached 100 mm³, mice were switched to doxycycline (Dox) chow, and tumor size was measured weekly (FIG. 6F). Residual tumors were excised, fixed, and stained with H&E (FIG. 6G). * in FIGS. 6E and 6G indicates necrosis, with necrotic area quantified at right. Lysates from FIGS. 6D and 6E were subjected to immunoblotting for pyroptosis markers (FIGS. 6H and 6I). Error bars represent ±S.E.M (n=3 biological replicates), ****P<0.0001, two-way ANOVA.

[0093] FIGS. 7A-7E demonstrate Y1275 phosphorylation is regulated by PTP1B and controls RNF213 oligomerization, in accordance with an exemplary embodiment of the present disclosure. FIG. 7A shows PTP1B inhibitor sensitizes multiple breast cancer subtypes to hypoxia. The indicated cell lines were treated with the PTP1B inhibitor claramine, placed in 0.1% O₂ for 55 hours, and viable cells were counted. FIG. 7B shows spectrum supporting phosphorylation of RNF213-Y1275 on peptide EAAEPLSEPKEDQEAAELLSEPEEESERHILELEEVYDYLYQPSYR (SEQ ID NO: 4590), from 3×-FLAG-RNF213-TurboID-enriched samples. The HCD MS/MS spectra of sextuply charged m/z 922.9244 ion recorded in the ion trap of an Orbitrap Eclipse is shown. Observed N-terminal sequence ions (b-ions) are shown in blue, and C-terminal fragment ions (y-ions) are shown in red. Backbone cleavages are indicated in the peptide sequence, and the phosphorylated tyrosine is indicated (red). Figure discloses SEQ ID NOS 18 and 4661, respectively, in order of appearance. FIG. 7C provides Y1275 phosphorylation affects RNF213-PTP1B interaction. AU565 RNF213-KO-PTPN1-KD cells with or without stable expression of doxycycline (Dox)-inducible, HA-Ptpn1^{D/A} were transiently transfected with 3×-FLAG-RNF213 or 3×-FLAG-RNF213^{Y1275F} and exposed to 0.5 μg/ml Dox (+) or left untreated (−). Lysates (top panel) were subjected to anti-HA immunoprecipitation and immunoblotting for the indicated proteins (bottom panel). ERK2 serves as a loading control. FIG. 7D shows RNF213-Y1275 is also phosphorylated in AU565 cells. AU565 RNF213-KO-PTPN1-KD cells were transiently transfected with 3×-FLAG-RNF213 or 3×-FLAG-RNF213^{Y1275F}. Lysates were subjected to anti-FLAG immunoprecipitation and immunoblotting, as indicated, and pY/FLAG signal (each in arbitrary units) was quantified. FIG. 7E shows Y1275 phosphorylation promotes RNF213 oligomerization. AU565 RNF213-KO-PTPN1-KD cells were transiently transfected with expression vectors for GFP-RNF213 and 3×-FLAG-RNF213 or 3×-FLAG-RNF213^{Y1275F}. Lysates were subjected to anti-FLAG immunoprecipitation/immunoblotting. Vinculin serves as a loading control. Error bars represent ±S.E.M. FIGS. 7A and 7D (lower panels) are pooled results from three biological replicates; all other data except (FIG. 7B) are representative of these replicates. FIGS. 7A and 7E were evaluated by two-way ANOVA, whereas FIG. 7D was analyzed by ratio paired two-tailed t-test, **P<0.01, ***P<0.001, ****P<0.0001, ns=non-specific band.

[0094] FIGS. 8A-8G show ABL phosphorylates RNF213 on Y1275, in accordance with an exemplary embodiment of the present disclosure. FIG. 8A demonstrate that SKBR3 and SKBR3 PTPN1-KO cells were treated with the indicated inhibitors. Cells were subjected to 0.1% O₂ for 36 hours, and viable cells were counted. FIG. 8B illustrate that Dasatinib inhibits RNF213-PTP1B interaction. AU565 RNF213-KO-PTPN1-KD cells expressing substrate trapping mutant HA-Ptpn1^{D/A} were transiently transfected with expression vector for 3×-FLAG-RNF213, then treated with dasatinib or vehicle (DMSO) for 24 hours. Lysates were subjected to anti-HA immunoprecipitation/immunoblotting. FIG. 8C shows Dasatinib inhibits tyrosine phosphorylation of RNF213. AU565 RNF213-KO-PTPN1-KD cells were transiently transfected with 3×-FLAG-RNF213 followed by treatment with DMSO or dasatinib for 24 hours. Lysates were subjected to anti-FLAG immunoprecipitation/immunoblotting. FIG. 8D provides purity of 3×-FLAG-RNF213 and 3×-FLAG-RNF21^{Y1275F} proteins. FIG. 8E shows that ABL phosphorylates RNF213 on Y1275. Purified 3×-FLAG-RNF213 and 3×-FLAG-RNF213^{Y1275F} were phosphorylated in vitro with recombinant His-ABL1 for the indicated times. FIG. 8F shows that ABL1/ABL2 promote RNF213-mediated hypoxia hypersensitivity in PTPN1-KO cells. MDA-MB-361 and MDA-MB-361 PTPN1-KO cells were transfected with siRNAs targeting ABL1 and/or ABL2 or control non-targeting siRNA. Cells were subjected to 0.1% O₂ for 48 hours, and viable cells were counted (top panel). Immunoblot shows knockdown efficiency (bottom panel). Error bars represent ±S.E.M. All panels (FIGS. 8A-8F) are representative results from two independent experiments, except for the quantifications in FIGS. 8A, 8C, and 8F, which are pooled data from triplicates. Purified 3×-FLAG-RNF213 was phosphorylated in vitro with recombinant His-ABL1 for 10 minutes, followed by anti-FLAG immunoprecipitation and incubation with recombinant GST-PTP1B in the presence or absence of the PTP inhibitor sodium orthovandate (FIG. 8G). FIGS. 8A and 8F were evaluated by two-way ANOVA; FIG. 8C was analyzed by ratio paired two-tailed t-test **P<0.01, ****P<0.0001, ns=non-specific band.

[0095] FIGS. 9A-9E provide sample preparation for proximity-based labelling screen, in accordance with an exemplary embodiment of the present disclosure. FIG. 9A shows HeLa FlpIn-TRex cells reconstituted with Control Turbo, N-turbo, or C-turbo were induced with 0.5 μg/ml of Dox. Post-biotin labelling, lysates (left panel) were subjected to streptavidin affinity purification (right panel) and immunoblotting. In FIG. 9B, silver-stained SDS-PAGE gel showing that comparable amounts of streptavidin-purified proteins were submitted for mass spectrometry. FIG. 9C is a one-sided volcano plot showing fold-change and SAINT score of proteins identified in N-Turbo versus Control Turbo. Proteins with SAINT Score >5% FDR are highlighted. FIGS. 9C and 9E provide GO pathway analysis showing top 10 enriched molecular functions of C-Turbo (FIG. 9D)- and N-Turbo (FIG. 9E)-interacting proteins.

[0096] FIGS. 10A-10H demonstrate that CYLD/SPATA2 are relevant substrates of RNF213 in mediating hypoxia hypersensitivity, in accordance with an exemplary embodiment of the present disclosure. FIGS. 10A and 10B show SKBR3 and SKBR3 PTPN1-KO cells, with or without CYLD (FIG. 10A) or SPATA2 (FIG. 10B), subjected to 0.10% O₂ for the indicated times, and viable cells were counted (top panels). Immunoblots (bottom panels) show absence of CYLD/SPATA2 in stable pools generated with the indicated sgRNAs. FIG. 10C shows that RNF213 promotes SPATA2 and CYLD ubiquitylation. AU565 and AU565 RNF213-KO cells were co-transfected with expression constructs for HA-UB and ALFA-SPATA2 or ALFA-CYLD and treated with claramine or vehicle (−), as indicated. Lysates (left panel) were subjected to anti-ALFA immunoprecipitation/immunoblotting (right panel). FIG. 10D provides purity of 3×-FLAG-RNF213, 3×-FLAG-RNF21^{H4509A}, 3×-FLAG-RNF21^{H4014A}, 3×-FLAG-RNF21^{H4014A/H4509A} after indicated steps. FIGS. 10E and 10F show effects of RNF213 mutants on global ubiquitylation. Hela FlpIn-TRex RNF213-KO (FIG. 10E) and BT474 RNF213-KO (FIG. 10F) cells were co-transfected with expression constructs for HA-UB and 3×-FLAG-tagged RNF213 or -RNF213^{H4014A}-RNF213^{H4509A} or -RNF213^{H4014A/H4509A}. Cells were subjected to 0.1% O₂ for the indicated times, and lysates were subjected to immunoblotting. FIGS. 10G and 10H show in vitro ubiquitylation assays with CYLD (FIG. 10G) or SPATA2 (FIG. 10H) using wild type or K63R ubiquitin. CYLD (FIG. 10G) and SPATA2 (FIG. 10H) were recovered and immunoblotted, as indicated. Error bars represent S.E.M. FIGS. 10A and 10B are pooled results from three biological replicates; data in FIGS. 10C, 10E, and 10F are representative of replicates, ****P<0.0001, two-way ANOVA, ns=non-specific bands.

[0097] FIGS. 11A-11F demonstrate RNF213 RING mutants/highly penetrant MMD SNPs activate RZ domain and require ATPase activity, in accordance with an exemplary embodiment of the present disclosure. FIGS. 11A through 11D show AU565 RNF213-KO cell reconstituted with RNF213^{WT} or the indicated RNF213 mutants, parental AU565 cells, and AU565 RNF213-KO cells with or without PTPN1 deletion, subjected to 0.1% O₂ for 40 hours. Immunoblotting was performed for the indicated proteins. FIG. 11E show RZ and ATPase domains of RNF213 are required for hypoxia hypersensitivity of AU565 PTPN1-KO cells. Cells prepared as in FIGS. 11A-11D were subjected to 0.1% O₂, and viable cells were counted after 48 hours. RNF213-KO BT474 cells reconstituted with RNF213 or RNF213^{Y1275F} were treated with 20 μM cycloheximide (CHX) for the indicated times. MG132 (10 μM), 100 μM CQ (chloroquine), or vehicle (DMSO) was added for the last 3 hours, as indicated, and lysates were immunoblotted for the indicated proteins (FIG. 11F). Error bars represent ±S.E.M (n=3 biological replicates, each panel); each blot is representative of two biological replicates. ***P<0.001, ****P<0.0001, two-way ANOVA, ns=non-specific band.

[0098] FIGS. 12A-12K demonstrate PTPN1-KO cell death via RNF213- and LUBAC-dependent pyroptosis, in accordance with an exemplary embodiment of the present disclosure. FIG. 12A shows that wild-type, but not RING-dead, RNF213 requires LUBAC for CYLD/SPATA2 degradation. AU565 RNF213-KO cells reconstituted with wild-type RNF213 or RNF213^{H4014A}, parental AU565 cells, and AU565 RNF213-KO cells with or without PTPN1 deletion were transfected with RBCK1 or control siRNAs. Cells were subjected to 0.1% 02 for 40 hours, lysed, and immunoblotted as indicated (top panel). RBCK1 knockdown was confirmed by RT-qPCR (bottom panel). FIG. 12B demonstrates RING-dead RNF213 bypasses LUBAC requirement. The indicated cells were subjected to 0.1% O₂ for 48 hours, and viable cell numbers were counted. FIG. 12C shows RNF213 promotes NF-κB activity. The cells described in FIG. 11E were transfected with an NF-κB reporter construct and subjected to 0.1% O₂ for 40 hours. Firefly and Renilla luciferase signals were measured, reporter activity was quantified as the ratio of Firefly/Renilla signal, and all signals were normalized that from parental AU565 cells. FIGS. 12D and 12E demonstrate hypoxic cell death in PTPN1-KO cells is caspase-dependent. SKBR3 and SKBR3 PTPN1-KO (FIG. 12D) and MDA-MB-361 and MDA-MB-361 PTPN1-KO (FIG. 12E) cells were treated with the indicated inhibitors, placed in 0.1% O₂ for 40 (FIG. 12D) or 48 (FIG. 12E) hours, and cell viability was assessed. FIGS. 12F and 12G demonstrate hypoxic cell death in MDA-MB-361 PTPN1-KO cells requires inflammatory caspases and the inflammasome. As in (FIG. 12E), except with/without VX765 (FIG. 12F) or MCC950 (FIG. 12G). FIG. 12H shows GSDMD promotes hypoxic cell death of PTPN1-KO cells. Pools of MDA-MB-361 and MDA-MB-361 PTPN1-KO cells, with or without GSDMD deletion, were subjected to 0.1% O₂, and cell viability was measured at 48 hours (top panel). Immunoblot indicates efficiency of GSDMD knockout (bottom panel). IL-1β (FIG. 12J) and % maximal LDH release (FIG. 12K) were quantified in supernatants from the indicated hypoxic cells. FIG. 121 demonstrates hypoxia-hypersensitive cells release IL-1β. Cells prepared as in FIG. 12E were subjected to 0.1% 02 for 48 hours, and IL-10 in supernatants was analyzed by immunoassay. In all panels, error bars represent ±S.E.M. (n=3 biological replicates), and each blot is representative of two biological replicates. ***P<0.001, ****P<0.0001, two-way ANOVA, ns=non-specific band.

[0099] FIGS. 13A-13L demonstrate hypoxia-evoked ER stress activates the inflammasome for RNF213-triggered pyroptosis, in accordance with an exemplary embodiment of the present disclosure. FIGS. 13A and 13B show ER stress promotes hypoxia hypersensitivity. MDA-MB-361 and MDA-MB-361 PTPN1-KO cells treated with the IRE1α inhibitor 4μ8C (FIG. 13A) or the PERK inhibitor GSK2606414 (FIG. 13B), were subjected to 0.1% O₂ for 48 hours, and viability was assessed. FIG. 13C shows ER stress causes pyroptosis in CYLD/SPATA2-deficient cells in normoxia. MDA-MB-361 cells, with or without CYLD/SPATA2, were treated with tunicamycin (10 μM) or thapsigargin (5 μM) for 40 hours and viability was assessed. For FIGS. 13D and 13E, ERN1, HSPA5, and DDIT3 mRNA levels in parental and PTPN1-KO BT474 cells subjected to 0.1% O₂ were quantified by qRT-PCR. DDIT3 levels were also assessed in parental and PTPN1-KO BT474 cells transfected with DDIT3 or control siRNAs for 24 hours (FIG. 13E). Cells transfected with siRNAs as in FIG. 13E were subjected to 0.1% O₂ for 48 hours, and viable cells were counted (FIG. 13F). Parental and PTPN1-KO BT474 cells were transfected with an NF-κB reporter construct and subjected to 0.10% O₂ for 48 hours (FIG. 13G). Reporter activity was quantified as the ratio of Firefly/Renilla signal, normalized to that in parental cells. Expression of the indicated genes was assessed by qRT-qPCR (FIG. 13H). Same as in FIG. 13G and FIG. 13H, except that the cognate MDA-MB-361 cells were analyzed (FIGS. 131 and 13J). For FIGS. 13K and 13L, BT474 cells with or without CYLD/SPATA2 were treated with nigericin (20 μM) for 6 hours, and cell viability (FIG. 13K) and LDH release (FIG. 13L) were assessed. Error bars represent ±S.E.M. (n=3 biological replicates), ****P<0.0001, two-way ANOVA.

[0100] FIG. 14 is a schematic model for PTP1B/RNF213-mediated hypoxia hypersensitivity. Left panel: ABL1/2-catalyzed phosphorylation of RNF213 at Y1275 promotes RNF213 oligomerization; PTP1B dephosphorylates this site. Oligomerized RNF213, via its RZ domain, ubiquitylates CYLD and SPATA2, and further ubiquitylation, catalyzed by the LUBAC complex, promotes CYLD/SPATA2 degradation. Left middle panel: ATPase-dead RNF213 cannot oligomerize and does not promote hypoxia hypersensitivity. Right middle panel: RING-dead RNF213 enhances RZ-mediated ubiquitylation of CYLD/SPATA2 and leads to CYLD and SPATA2 degradation even in the absence of LUBAC. Degradation of CYLD/SPATA2 leads to increased NF-κB signaling, priming pyroptosis. Hypoxia-associated ER-stress provides the “second signal” to activate the inflammasome formation, leading to RNF213-driven pyroptotic cell death. Right panel: RZ-dead or RING/RZ-dead RNF213 cannot ubiquitylate CYLD/SPATA2 and does not promote hypoxia hypersensitivity in response to PTP1B inhibition.

[0101] FIGS. 15A and 15B provide schematic domain map and domain amino acid sequences of RNF213. For the relevance of RNF213 domains or amino acid residues (see also, e.g., Table 6): (1) Y1275 phosphorylation by ABL1/2 promotes RNF213 oligomerization. This site is dephosphorylated by PTP1B; (2) ATPase domains AAA3 and AAA4 are functional ATPase domains required for RNF213 oligomerization; (3) K2426, K2775 or E2845 are critical amino acid sites required for ATPase activity and RNF213 oligomerization; (4) H4014 is catalytic site for RING domain activity of RNF213 which may be required for ubiquitylation; (5) H4509 is a catalytic site for RZ domain activity of RNF213 which can be required for ubiquitylation; (6) C9997Y is a highly penetrant MMD SNP; (7) R4810K is the most prevalent but low penetrance MMD SNP. The present disclosure demonstrates RING-impaired (H4014A) RNF213 has a hyperactive RZ domain, but this can additionally require RNF213 oligomerization (e.g., in context with CYLD and SPATA2 as substrates). Since C3997Y SNP is also in the RING domain of RNF213 and it functions similarly to RING dead RNF213 (H4014A), the data described herein predicts that MMD SNPs will also be a gain of function of RZ domain.

[0102] FIG. 16 is a plot showing the number of drug-tolerant persister cells (DTPs) after HER2 inhibitor treatment comparing wild type to RNF213 knock out.

[0103] FIG. 17 demonstrates that TNK1 promotes global ubiquitylation upon PTP1B inhibition. BT474 cells were treated with DMSO or PTP1B inhibitor (Claramine, 10 PM). After 24 hours of seeding the cells, siControl or siTNK1 were transfected into the cells with either DMSO or PTP1B inhibitor. Lysates prepared were subjected to immunoblotting for the indicated proteins.

[0104] FIG. 18 demonstrates that TNK1 promotes RNF213-mediated hypoxia hypersensitivity in PTPN1-KO cells. BT474 and BT474 PTPN1-KO cells (top) or MDA-MB-361 and MDA-MB-361 PTPN1-KO cells (bottom) were transfected with TNK1 siRNAs targeting or control non-targeting siRNA. Cells were subjected to 0.1% O₂ for 55 hours for BT474 (top) or 48 hours for MDA-MB-361 (bottom), and viable cells were counted.

[0105] FIG. 19 demonstrates that TNK1 phosphorylates RNF213. 3×-FLAG-RNF213 was purified and phosphorylated in vitro with the indicated amounts of recombinant TNK1.

[0106] FIG. 20 illustrates PTP1B inhibition sensitized cancer cells to hypoxia. The indicated cell lines were treated with the PTP1B inhibitor claramine, placed in 0.1% O₂, and viable cells were counted. Pooled results from three biological replicates are shown; each data point represents the mean of triplicates from each experiment. Error bars represent +S.E.M.**P<0.01, ***P<0.001, ****P<0.0001, two-way ANOVA, ns=not significant.

[0107] FIGS. 21A-21E demonstrate that the PTP1B/RNF213/CYLD/SPATA2 pathway controls HER2+ breast tumorigenesis. For FIGS. 21A and 21B, parental and PTPN1-KO MDA-MB-361 cells, with or without CYLD-KO, were injected subcutaneously into athymic nu nu mice (6/group). Tumor size was measured weekly for 6 weeks (FIG. 21A). Residual tumors were excised, fixed, and stained with H&E (FIG. 21B). *representative necrotic regions. Tumors as described in FIGS. 6D and 6E were excised, fixed, and immunostained with Ki67 (top), HIF1α (middle), and EF5 (bottom) (FIG. 21C). ERN1, HSPA5, and DDIT3 mRNAs from the core or surface of parental and PTPN1-KO BT474 xenografts (3 each) were measured by qRT-PCR (FIG. 21D). Tumors from FIG. 6F were immunoblotted for the indicated proteins (FIG. 21E). **P<0.01, ***P<0.001, ****P<0.0001, two-way ANOVA with Dunnett's (FIG. 21A) or Tukey's (FIG. 21D) correction. Immunoblot, H & E images, and EF5 immunofluorescence are from one, and immunohistochemical staining (Ki67, HIF1α) are from two, sets of tumors. For gel source data, see FIG. 20.

[0108] FIG. 22 demonstrates that RNF213-KO sensitizes HER2+ breast cancer (BC) cells to HER2 tyrosine kinase inhibitor (TKI). Parental and RN % AF2I3-KO HER2+ breast cancer cell lines were treated with 1.2 gmol/L tucatinib (blue) or with 2.5 μmol/L lapatinib (red), with fresh media+inhibitors replaced every 3 days. Viable cells were counted after 15 days of treatment. Mean±SEM from three independent experiments is shown.

[0109] FIG. 23 demonstrates that the RNF213 RING-domain and ATPase-domain are required for drug-tolerant persister cancer cell (DTP) formation, Parental BT474 cells and RNF213-K0 BT474 cells stably reconstituted with RNF213 WT or the indicated RNF213 mutants were treated with 1.2 μmol/L tucatinib (blue) or with 2.5 μmol/L lapatinib (red), with fresh media+inhibitors replaced every 3 days. Viable cells were counted after 15 days of treatment. Mean±SEM from three independent experiments is shown.

### DETAILED DESCRIPTION

### Definitions

[0110] To facilitate an understanding of the principles and features of the various embodiments of the invention, various illustrative embodiments are explained below. Although exemplary embodiments of the invention are explained in detail, it is to be understood that other embodiments are contemplated. Accordingly, it is not intended that the invention is limited in its scope to the details of construction and arrangement of components set forth in the following description or examples. The invention is capable of other embodiments and of being practiced or carried out in various ways. Also, in describing the exemplary embodiments, specific terminology will be resorted to for the sake of clarity.

[0111] Unless otherwise defined herein, scientific and technical terms used in connection with the present invention shall have the meanings that are commonly understood by those of ordinary skill in the art. Further, unless otherwise required by context, singular terms shall include pluralities and plural terms shall include the singular. Generally, nomenclatures used in connection with, and techniques of, cell and tissue culture, molecular biology, immunology, microbiology, genetics and protein and nucleic acid chemistry and hybridization described herein are those well-known and commonly used in the art.

[0112] The methods and techniques of the present invention are generally performed according to conventional methods well known in the art and as described in various general and more specific references that are cited and discussed throughout the present specification unless otherwise indicated. See, e.g., Sambrook et al., Molecular Cloning: A Laboratory Manual, 2d ed., Cold Spring Harbor Laboratory Press, Cold Spring Harbor, N.Y. (1989) and Ausubel et al., Current Protocols in Molecular Biology, Greene Publishing Associates (1992), and Harlow and Lane Antibodies: A Laboratory Manual, Cold Spring Harbor Laboratory Press, Cold Spring Harbor, N.Y. (1990), which are incorporated herein by reference. Enzymatic reactions and purification techniques are performed according to manufacturer's specifications, as commonly accomplished in the art or as described herein. The nomenclatures used in connection with, and the laboratory procedures and techniques of, analytical chemistry, synthetic organic chemistry, and medicinal and pharmaceutical chemistry described herein are those well-known and commonly used in the art. Standard techniques are used for chemical syntheses, chemical analyses, pharmaceutical preparation, formulation, and delivery, and treatment of patients.

[0113] The terms “inhibit” or “inhibition” as used herein refer to reducing a function or activity to an extent sufficient to achieve a desired biological or physiological effect. Inhibition may be complete or partial.

[0114] The phrase “pharmaceutically acceptable”, as used in connection with compositions described herein, refers to molecular entities and other ingredients of such compositions that are physiologically tolerable and do not typically produce untoward reactions when administered to a mammal (e.g., a human). Preferably, the term “pharmaceutically acceptable” means approved by a regulatory agency of the Federal or a state government or listed in the U.S. Pharmacopeia or other generally recognized pharmacopeia for use in mammals, and more particularly in humans.

[0115] As used herein, “pharmaceutically acceptable carrier” or “pharmaceutical acceptable excipient” includes any material which, when combined with an active ingredient, allows the ingredient to retain biological activity and is non-reactive with the subject's immune system. Compositions comprising such carriers are formulated by well-known conventional methods (see, for example, Remington's Pharmaceutical Sciences, 18th edition, A. Gennaro, ed., Mack Publishing Co., Easton, Pa., 1990; and Remington, The Science and Practice of Pharmacy 20th Ed. Mack Publishing, 2000).

[0116] The term “treating”, as used herein, unless otherwise indicated, means reversing, alleviating, inhibiting the progress of, delaying the progression of, delaying the onset of, or preventing the disorder or condition to which such term applies, or one or more symptoms of such disorder or condition. The term “treatment”, as used herein, unless otherwise indicated, refers to the act of treating as “treating” is defined immediately above. The term “treating” also includes adjuvant and neo-adjuvant treatment of a subject. For the avoidance of doubt, reference herein to “treatment” includes reference to curative, palliative and prophylactic treatment.

[0117] The phrase “effective amount” or “therapeutically effective amount” as used herein refers to an amount necessary (at dosages and for periods of time and for the means of administration) to achieve the desired therapeutic result. An effective amount is at least the minimal amount, but less than a toxic amount, of an active agent which is necessary to impart therapeutic benefit to a subject.

[0118] The terms “patient”, “individual”, “subject”, and “animal” are used interchangeably herein and refer to mammals, including, without limitation, human and veterinary animals (e.g., cats, dogs, cows, horses, sheep, pigs, etc.) and experimental animal models. In a preferred embodiment, the subject is a human.

[0119] “Drug-tolerant persister cells” or “drug-tolerant persister cancer cells” or “DTPs”, or the like, as used herein refer to a sub-population of cancer cells that survive under anti-cancer treatment(s), e.g., chemotherapy, radiation therapy, and/or targeted therapy.

[0120] It must also be noted that, as used in the specification and the appended claims, the singular forms “a,” “an,” and “the” include plural references, unless the context clearly dictates otherwise. For example, reference to a component is intended also to include composition of a plurality of components. References to a composition containing “a” constituent is intended to include other constituents in addition to the one named. In other words, the terms “a,” “an,” and “the” do not denote a limitation of quantity, but rather denote the presence of “at least one” of the referenced item.

[0121] Also, in describing the exemplary embodiments, terminology will be resorted to for the sake of clarity. It is intended that each term contemplates its broadest meaning as understood by those skilled in the art and includes all technical equivalents that operate in a similar manner to accomplish a similar purpose.

[0122] It is also to be understood that the mention of one or more method steps does not preclude the presence of additional method steps or intervening method steps between those steps expressly identified. Similarly, it is also to be understood that the mention of one or more components in a composition does not preclude the presence of additional components than those expressly identified.

[0123] The materials described hereinafter as making up the various elements of the present invention are intended to be illustrative and not restrictive. Many suitable materials that would perform the same or a similar function as the materials described herein are intended to be embraced within the scope of the invention. Such other materials not described herein can include, but are not limited to, materials that are developed after the time of the development of the invention, for example. Any dimensions listed in the various drawings are for illustrative purposes only and are not intended to be limiting. Other dimensions and proportions are contemplated and intended to be included within the scope of the invention.

[0124] Most tumors have hypoxic or anoxic areas¹, and cancer cells adapt to limited oxygen in the tumor microenvironment (TME) by successively activating several signaling pathways. In normoxia, the transcription factors HIF1α and HIF2α (hereafter “HIF”) are hydroxylated by oxygen-dependent prolyl hydroxylases (PHD 1-3), bound by the Van Hippel Lindau tumor suppressor gene product (VHL), and targeted for ubiquitylation and proteasomal degradation². PHD enzymes are inhibited in low oxygen, resulting in HIF stabilization and induction of hypoxia response genes. More severe hypoxia (≤1% O₂) triggers the AMP-dependent kinase (AMPK) and endoplasmic reticulum (ER) stress pathways, which evoke distinct adaptive responses^{3,4}. The activity of NF-κB, a key transcription factor controlling inflammation and innate immunity, also increases in hypoxia⁵ via (an) incompletely defined mechanism(s) that include(s) decreased PHD regulation of NF-κB pathway signaling components. Conversely, NF-κB is required for basal HIF expression, and thus directly and indirectly regulates the transcriptome of hypoxic cells⁶. The complex interplay between HIF-induced, metabolic (AMPK), integrated stress response (ER stress), and inflammatory/innate immune^{7,8}(NF-κB) pathways helps determine cancer cell sensitivity to conventional (chemoradiation) and targeted therapy³, as well as whether tumor cell death evoked by antineoplastic therapies is “sterile” or immunogenic⁹⁻¹¹.

[0125] The protein-tyrosine phosphatase PTP1B (encoded by PTPN1) resides on the cytosolic surface of the endoplasmic reticulum (ER), where it dephosphorylates incoming receptor tyrosine kinases (RTKs) and cytokine receptors^{12,13}. Best known as a negative regulator of insulin and leptin signaling¹⁴⁻¹⁷, PTP1B is also required for Neu (encoding rodent HER2)-induced breast cancer in mice^{18,19}. Moreover, PTPN1 is amplified (˜5%) and overexpressed (˜72%) in human cancer^{20,21}. It was previously reported that PTP1B deficiency or inhibition increased the death of HER2+ breast cancer cells maintained at ≤1% O₂ without altering the HIF, ER stress, or AMPK pathways²². Instead, hypoxia hypersensitivity required RNF213, a large (˜600 kDa) protein with AAA-ATPase and E3 ligase domains. PTP1B deficiency/inhibition promoted an increase in RNF213-dependent global ubiquitylation, and RNF213 was tyrosine phosphorylated and appeared to be a PTP1B substrate. However, key details, including exactly how PTP1B regulates RNF213 and the mechanism and type of RNF213-dependent cell death, remained unclear.

[0126] Single nucleotide polymorphisms (SNPs) in RNF213 are associated with Moyamoya disease (MMD), a rare syndrome characterized by precocious carotid artery stenosis and stroke, often in teenagers or young adults²³⁻²⁵. RNF213 features six AAA-ATPase modules, two of which are active, a RING domain, a recently discovered “RZ” E3 ligase domain, and large unstructured regions²⁶⁻³⁰. In an AAA-ATPase- and ISG15-dependent manner, RNF213 can oligomerize into a hexameric, ˜3.6 mDa complex^{26,28}. RNF213 also localizes on lipid droplets³¹ (also dependent on AAA-ATPase activity/ISG15), and is required for lysophosphatidic acid (LPA)-induced cell death in vitro³². Transfection studies implicate RNF213 in NF-κB signaling^{30,32}, and recently, the RNF213 RZ domain was found to ubiquitylate lipid A of Salmonella²⁹. In concert, these findings suggest roles for RNF213 in lipotoxicity and inflammation, both potentially relevant for MMD pathogenesis. The most highly penetrant MMD SNPs affect the RNF213 RING, not the RZ domain^{27,30,33}, leaving the detailed molecular pathogenesis of this disease—and its relationship, if any, to hypoxia hypersensitivity in PTP1B-deficient/inhibited breast cancer cells obscure.

[0127] In certain embodiments, inhibitors or activators of specific domains of the RNF213 protein may provide a therapeutic benefit to patients having one or more of breast cancer, pancreatic cancer, or other cancers with hypoxic tumor microenvironments (TMEs); to cancer patients treated with chemotherapy or targeted therapy that leave “drug-tolerant persister” cancer cells (DTPs), to individuals with Moyamoya Disease (MMD)/stroke/arthrosclerosis); non-alcoholic steatohepatitis (NASH), non-alcoholic fatty liver disease (NAFLD), or other types of lipotoxicity (e.g., primary lipodystrophies); autoimmune diseases and inflammatory diseases.

[0128] In certain embodiments, inhibitors or activators of specific domains of the RNF213 protein may provide a therapeutic benefit, e.g., in combination with a HER2 tyrosine kinase inhibitor (TKI) to treat a drug-tolerant population (DTP) in breast cancer and potentially other malignancies. In some embodiments, inhibiting expression or promoting degradation of RNF213 can have salutary effects on preventing DTP formation.

[0129] In some embodiments, an RNF213-targeted agent can be used to treat the above-listed conditions. For instance, for hypoxic breast tumors (and other hypoxic tumors), agents can include small molecule activators of RNF213 ATPase activity, RNF213 oligomerization, or the RNF213 RZ domain, or small molecule inhibitors of the RNF213 RING domain. In some embodiments, small molecule activators or inhibitors may be used in combination with conventional chemotherapy, antibody drug conjugates (ADCs), targeted therapies, therapeutic antibodies, or combinations thereof.

[0130] In another embodiment, for Moyamoya disease (MMD), stroke, or atherosclerosis, inhibitors of the ATPase or RZ domain of RNF213 or RNF213 proteolysis targeting chimeras (PROTACs) may have therapeutic potential in MMD. Inhibitors of specific tyrosine kinases (for ABL1/2-asciminib, dasatinib, imatinib, nilotinib; for TNK1, TP-5801) that promote RNF213 oligomerization can also have therapeutic potential. RNF213 interactors identified by TurboID proximity-based labeling described herein are involved in stroke, atherosclerosis, lipotoxicity, and cholesterol metabolism. A hallmark of strokes can be inflammatory cell death (pyroptosis). RNF213 triggers pyroptosis through activation of NF-κB in a stress condition when accompanied by hypoxia. Therefore, ABL or TNK inhibitors, inhibitors of the RNF213 ATPase domain or RZ domain, inhibitors of RNF213 oligomerization, RNF213 PROTACs, or activators of RNF213 RING domain could have utility in limiting neuronal cell death in strokes, MI, and other steno-occlusive disorders.

[0131] In yet another embodiment, for non-alcoholic steatohepatitis (NASH), non-alcoholic fatty liver disease (NAFLD), or lipotoxicity, RNF213 ATPase or RZ inhibitors, inhibitors of RNF213 oligomerization, RNF213 PROTACs, or activators of RNF213 RING domain may prevent or limit liver damage in NASH.

[0132] In certain embodiments, for autoimmune diseases and inflammatory diseases, wild-type RNF213 can promote NF-κB signaling through the degradation of CYLD/SPATA2. Impairing RNF213 ATPase activity or RZ activity, inhibiting RNF213 oligomerization, activators of RNF213 RING domain or inhibitors of tyrosine kinases for RNF213 (e.g., ABL1/2 or TNK1) could be therapeutic for such cases.

[0133] In another aspect, the present disclosure provides methods for preventing the generation of drug-tolerant persisters (DTPs), for example, in HER2+ breast cancer. RNF213 knockout cells are more susceptible to prescribed HER2+BC treatment drugs like lapatinib, tucatinib (HER2 inhibitors) suggesting that RNF213-KO cells are less likely to form DTPs. Combining a HER2-targeted agent with RNF213 PROTACs or inhibitors of other RNF213 domains could augment HER2-based therapies. ABL1/2 or TNK1 inhibition might also have benefits. In certain embodiments, for HER2+ breast cancer, combining a HER2-targeted agent with, e.g., RNF213 PROTACs, inhibiting RNF123 expression, or inhibitors or activators of specific RNF213 domains may be useful in the treatment of such cancers.

[0134] A tyrosine phosphorylation site in RNF213 was identified herein as being regulated by PTP1B (Y1275) and phosphorylated by ABL1/2. Y1275 phosphorylation promotes AAA-ATPase domain-dependent oligomerization of RNF213 and activation of its ubiquitin ligase activity. Proximity ligation experiments with Turbo-ID described herein identified multiple novel interacting proteins, including CYLD/SPATA2, a major negative regulator of NF-κB. Detailed analysis described herein shows that the RNF213, via its RZ domain, ubiquitylates CYLD/SPATA2 and, in concert with the LUBAC complex, leads to their degradation in hypoxia, NF-κB activation, induction of NLRP3, and inflammasome priming. The RZ domain also ubiquitylates Lipid A of Salmonella LPS, and in concert with LUBAC, promotes bacterial clearance by autophagy. Hypoxia-evoked ER stress then provides the “second signal” leading to inflammasome activation and Gasdermin D-dependent pyroptotic cell death. Hence, PTP1B inhibition/degradation, in addition to killing hypoxic tumor cells that are typically resistant to chemoradiation and targeted therapies, could “turn cold tumors hot” and facilitate immunological clearance. HER2+ breast cancer and many other breast cancer lines also show hypoxia hypersensitivity upon PTP1B inhibition. The RING domain of RNF213 negatively regulates RZ domain ubiquitin ligase activity and removes the requirement for the LUBAC complex to degrade CYLD/SPATA2 and activate NF-κB. The most common MMD SNPs affect the RING, and MMD alleles activate NF-κB. This may be related to the frequent co-occurrence of autoimmune and inflammatory diseases with MMD. Furthermore, several other interactors in the Turbo screen described herein are implicated in hypoxia and atherosclerosis such that RNF213 might be targeted for therapeutic benefit in those disorders.

[0135] As described herein, RNF213 promotes pyroptosis, a characteristic feature of vascular occlusive events. By understanding that tyrosine kinases ABL1/2 and TNK1 enhance RNF213 pyroptotic activity, use of tyrosine kinase inhibitors is explored for stroke treatment. Moreover, direct inhibitors targeting RNF213 are developed for greater specificity. A pathway and mechanism for targeting RNF213, a giant AAA-ATPase/ring finger-containing ubiquitin ligase is described, which promotes pyroptotic cell death in severe hypoxia. The role of RNF213 can require its RZ domain as well as its ATPase domain, whereas the RING domain inhibits the RZ domain. The ATPase activity of RNF213 controls oligomerization of RNF213 and is negatively regulated by the protein-tyrosine phosphatase PTP1B and positively regulated by ABL family kinases and TNK1. Single nucleotide polymorphism (SNPs) in RNF213 are known to be associated with Moyamoya disease. Inactivation of the RNF213 RING domain (where most of the highly penetrant MMD SNPs reside) promotes its RZ activity. Since this RZ activity is requires ATPase activity, the findings that RNF213 oligomerization is promoted by ABL family kinases and TNK1 could have therapeutic potential for Moyamoya disease, as well as for patients with more conventional occlusive events (e.g., stroke, myocardial infarction (MI), arterial thrombosis) and diseases of lipotoxicity (e.g., hepatic steatosis, lipodystrophy). Specifically, ABL, TNK1, or RNF213 RZ inhibitors or degraders could be active in these settings.

[0136] It was found that ABL1/2 phosphorylate, whereas PTP1B dephosphorylates, RNF213 on tyrosine 1275 (Y1275). Phosphorylation of this site promotes RNF213 oligomerization and activation of its E3 ligase activity. Via proximity-based proteomics, the CYLD-SPATA2 complex, a major negative regulator of NF-κB activation, was identified as an RNF213 substrate critical for hypoxia-induced cell death. Moreover, the RZ domain is required for CYLD-SPATA2 ubiquitylation/degradation, while the RING domain restrains RZ activity. Wild type RNF213 requires the LUBAC complex for effective CYLD-SPATA2 degradation, but RNF213 RING mutants, including highly penetrant SNPs associated with MMD, bypass this requirement. Increased RNF213 activity, caused by PTP1B deficiency/inhibition or RNF213 RING mutations, drives CYLD/SPATA2 ubiquitylation and degradation and increases NF-κB activity, priming cells for pyroptosis via the NLRP3 inflammasome. Concomitantly, hypoxia-induced ER stress delivers the “second signal” resulting in increased cancer cell death. The results described herein have implications for the mechanism of action and potential uses of dual inhibitors of PTP1B/TC-PTP (PTPN2)³⁴, now in clinical trials for various cancers, as well as for the pathogenesis of MMD and other steno-occlusive disorders.

### Inhibitors of RNF213 Protein Expression

[0137] In some embodiments, the inhibitor of RNF213 protein expression is an siRNA, an shRNA, an antisense oligonucleotide, a miRNA, or a site-specific nuclease. Non-limiting examples of the inhibitor are described below.

[0138] In some embodiments, the inhibitor is a small interfering RNAs (siRNA), also known as short interfering RNA or silencing RNA. siRNAs are a class of double-stranded RNA molecules, typically about 20-25 base pairs in length that target nucleic acids (e.g., mRNAs) for degradation via the RNA interference (RNAi) pathway in cells. Such siRNA molecules typically include a region of sufficient homology to the target region, and are of sufficient length in terms of nucleotides, such that the siRNA molecules down-regulate target nucleic acid. It is not necessary that there be perfect complementarity between the siRNA molecule and the target, but the correspondence must be sufficient to enable the siRNA molecule to direct sequence-specific silencing, such as by RNAi cleavage of the target RNA. In some embodiments, the sense strand need only be sufficiently complementary with the antisense strand to maintain the overall double-strand character of the molecule.

[0139] Specificity of siRNA molecules may be measured via the binding of the antisense strand of the molecule to its target RNA. Effective siRNA molecules are often fewer than 30 to 35 base pairs in length, e.g., to prevent stimulation of non-specific RNA interference pathways in the cell by way of the interferon response, however longer siRNA may also be effective. In various embodiments, the siRNA molecules are 5, 6, 7, 8, 9, 10, 11, 12, 13, 14, 15, 16, 17, 18, 19, 20, 21, 22, 23, 24, 25, 26, 27, 28, 29, or 30 base pairs in length. In various embodiments, the siRNA molecules are about 35 to about 70 more base pairs in length. In some embodiments, the siRNA molecules are more than 70 base pairs in length. In some embodiments, the siRNA molecules are 8 to 40 base pairs in length, 10 to 20 base pairs in length, 10 to 30 base pairs in length, 15 to 20 base pairs in length, 19 to 23 base pairs in length, 21 to 24 base pairs in length. In some embodiments, the sense and antisense strands of the siRNA molecules are each independently about 19 to about 24 nucleotides in length. In some embodiments, the sense strand of an siRNA molecule is 23 nucleotides in length and the antisense strand is 21 nucleotides in length. In some embodiments, both the sense strand and the antisense strand of an siRNA molecule are 21 nucleotides in length.

[0140] After selection of a suitable target RNA sequence, siRNA molecules that comprise a nucleotide sequence complementary to all or a portion of the target sequence, i.e., an antisense sequence, may be designed and prepared using suitable methods (see, e.g., U.S. Patent Publication Nos. 2004/0077574 and 2008/0081791 and PCT Publication No. WO 2004/016735). In some embodiments, the siRNA molecule may be single-stranded (i.e., a ssRNA molecule comprising just an antisense strand) or double stranded (i.e., a dsRNA molecule comprising an antisense strand and a complementary sense strand that hybridizes to form the dsRNA). In various embodiments, the siRNA molecules may comprise a duplex, asymmetric duplex, hairpin or asymmetric hairpin secondary structure, comprising self-complementary sense and/or antisense strands.

[0141] In various embodiments, the antisense strand of the siRNA molecule is 5, 6, 7, 8, 9, 10, 11, 12, 13, 14, 15, 16, 17, 18, 19, 20, 21, 22, 23, 24, 25, 26, 27, 28, 29, or 30 nucleotides in length. In various embodiment, the antisense strand of the siRNA molecule is about 35 to about 70 nucleotides in length. In various embodiment, the antisense strand of the siRNA molecule is more than 70 nucleotides in length. In some embodiments, the antisense strand is 8 to 40 nucleotides in length, 10 to 20 nucleotides in length, 10 to 30 nucleotides in length, 15 to 20 nucleotides in length, 19 to 23 nucleotides in length, or 21 to 24 nucleotides in length.

[0142] In some embodiments, the sense strand of the siRNA molecule is 5, 6, 7, 8, 9, 10, 11, 12, 13, 14, 15, 16, 17, 18, 19, 20, 21, 22, 23, 24, 25, 26, 27, 28, 29, or 30 more nucleotides in length. In various embodiments, the sense strand of the siRNA molecule is about 30 to about 70 nucleotides in length. In various embodiments, the sense strand of the siRNA molecule more than 70 nucleotides in length. In some embodiments, the sense strand is 8 to 40 nucleotides in length, 10 to 20 nucleotides in length, 10 to 30 nucleotides in length, 15 to 20 nucleotides in length, 19 to 23 nucleotides in length, 21 to 24 nucleotides in length.

[0143] In various embodiments, siRNA molecules can comprise an antisense strand comprising a region of complementarity to a target region in a target mRNA. In some embodiments, the region of complementarity is at least 70%, at least 75%, at least 80%, at least 85%, at least 90%, at least 91%, at least 92%, at least 93%, at least 94%, at least 95%, at least 96%, at least 97%, at least 98%, at least 99% or 100% complementary to a target region in a target mRNA. In some embodiments, the target region may comprise a region of consecutive nucleotides in the target mRNA. In some embodiments, it may not be requisite for a region of complementarity to be 100% complementary to that of its target to be specifically hybridizable or specific for a target RNA sequence.

[0144] In some embodiments, siRNA molecules disclosed herein may comprise an antisense strand that comprises a region of complementarity to a target RNA sequence and the region of complementarity is in the range of 8 to 20, 8 to 35, 8 to 45, or 10 to 50, or 5 to 55, or 5 to 40 nucleotides in length. In some embodiments, a region of complementarity is 5, 6, 7, 8, 9, 10, 11, 12, 13, 14, 15, 16, 17, 18, 19, 20, 21, 22, 23, 24, 25, 26, 27, 28, 29, 30, 31, 32, 33, 34, 35, 36, 37, 38, 39, 40, 41, 42, 43, 44, 45, 46, 47, 48, 49, or 50 nucleotides in length. In some embodiments, the region of complementarity is complementary with at least 5, at least 6, at least 7, at least 8, at least 9, at least 10, at least 11, at least 12, at least 13, at least 14, at least 15, at least 16, at least 17, at least 18, at least 19, at least 20, at least 21, at least 22, at least 23, at least 24, at least 25, at least 30, at least 35, or more consecutive nucleotides of a target RNA sequence. In some embodiments, siRNA molecules comprise an antisense strand having a nucleotide sequence that contains no more than 1, 2, 3, 4, 5, 6, 7, 8, 9, or 10 base mismatches compared to the portion of the consecutive nucleotides of target RNA sequence. In some embodiments, siRNA molecules comprise a nucleotide sequence that has up to 3 mismatches over 15 bases, or up to 4 mismatches over 10 bases with a target sequence. In some embodiments, siRNA molecules comprise an antisense strand having a nucleotide sequence that has up 0, 1, 2, or 3 mismatches over 15-22 bases with a target sequence. In some embodiments, siRNA molecules comprise an antisense strand having a nucleotide sequence that has 0, 1, or 2 mismatches over 15-22 bases with a target sequence. In some embodiments, siRNA molecules comprise an antisense strand having a nucleotide sequence that has 0 or 1 mismatch over 15-22 bases with a target sequence. In some embodiments, siRNA molecules comprise an antisense strand having a nucleotide sequence that has 0 mismatches over 15-22 bases with a target sequence.

[0145] In various embodiments, siRNA molecules may comprise an antisense strand comprising a nucleotide sequence that is at least 70%, at least 75%, at least 85%, at least 90%, at least 95%, or 100% complementary to the target RNA sequence of the antisense oligonucleotides disclosed herein. In some embodiments, siRNA molecules comprise an antisense strand comprising a nucleotide sequence that is at least 70%, at least 75%, at least 85%, at least 90%, at least 95%, or 100% identical to any of the antisense oligonucleotides provided herein. In some embodiments, siRNA molecules comprise an antisense strand comprising at least 5, at least 6, at least 7, at least 8, at least 9, at least 10, at least 11, at least 12, at least 13, at least 14, at least 15, at least 16, at least 17, at least 18, at least 19, at least 20, at least 21, at least 22, at least 23, at least 24, at least 25, at least 30, at least 35, or more consecutive nucleotides of any of the antisense oligonucleotides provided herein.

[0146] In some embodiments, double-stranded siRNA can comprise sense and anti-sense RNA strands that are different lengths or the same length. In some embodiments, double-stranded siRNA molecules may also be generated from a single oligonucleotide in a stem-loop structure. The self-complementary sense and antisense regions of the siRNA molecule having a stem-loop structure may be linked by means of a nucleic acid based or a non-nucleic acid-based linker. In some embodiments, an siRNA having a stem-loop structure comprises a circular single-stranded RNA having two or more loop structures and a stem comprising self-complementary sense and antisense strands. In some embodiments, the circular RNA may be processed in vivo or in vitro to produce an active siRNA molecule which may be capable of mediating RNAi. Small hairpin RNA (shRNA) molecules are therefore also contemplated in the present disclosure. Such molecules may comprise a specific antisense sequence together with the reverse complement (sense) sequence, which may be separated by a spacer or loop sequence in some instances. A reverse complement described herein may comprise a sequence that is a complement sequence of a reference sequence, wherein the complement sequence is written in the reverse orientation. Due to codon usage redundancy, a reverse complement can diverge from a reference sequence that encodes the same polypeptide. As used herein, “reverse complement” also includes sequences that are, e.g., at least 30%, 35%, 40%, 45%, 50%, 55%, 60%, 65%, 70%, 75%, 80%, 85%, 90%, 91%, 92%, 93%, 94%, 95%, 96%, 97%, 98%, 99%, or 100% identical to the reverse complement sequence of a reference sequence. Cleavage of the spacer or loop can provide a single-stranded RNA molecule and its reverse complement, such that they may anneal to form a dsRNA molecule. In various embodiments, additional optional processing steps may result in removal or addition of 1, 2, 3, 4, 5 or more nucleotides from the 3′ end and/or the 5′ end of one or both strands. A spacer may be of a suitable length to allow the antisense and sense sequences to anneal and form a double-stranded structure or stem prior to cleavage of the spacer. In certain embodiments subsequent optional processing steps may result in removal or addition of 1, 2, 3, 4, 5 or more nucleotides from the 3′ end and/or the 5′ end of one or both strands. In some embodiments, a spacer sequence can be an unrelated nucleotide sequence that may be, e.g., situated between two complementary nucleotide sequence regions that, when annealed into a double-stranded nucleic acid, can comprise a shRNA.

[0147] The length of the siRNA molecules can vary from about 10 to about 120 nucleotides depending on the type of siRNA molecule being designed. Generally, between about 10 and about 55 of these nucleotides may be complementary to the RNA target sequence. For instance, when the siRNA is a double-stranded siRNA or single-stranded siRNA, the length can vary from about 10 to about 55 nucleotides, whereas when the siRNA is a shRNA or circular molecule, the length can vary from about 30 nucleotides to about 110 nucleotides.

[0148] In various embodiments, an siRNA molecule can comprise a 3′ overhang at one end of the molecule. In some embodiments, the other end can be blunt-ended or may also comprise an overhang (e.g., 5′ and/or 3′). When the siRNA molecule comprises an overhang at both ends of the molecule, the length of the overhangs may be different or the same. In some embodiments, an siRNA molecule described herein may comprises 3′ overhangs of about 1 to about 3 nucleotides on both ends of the molecule. In some embodiments, the siRNA molecule comprises 3′ overhangs of about 1 to about 3 nucleotides on both the sense strand and the antisense strand. In some embodiments, the siRNA molecule comprises 3′ overhangs of about 1 to about 3 nucleotides on the antisense strand. In some embodiments, the siRNA molecule may comprise 3′ overhangs of about 1 to about 3 nucleotides on the sense strand.

[0149] In various embodiments, the siRNA molecule comprises one or more modified nucleotides (e.g., 1, 2, 3, 4, 5, 6, 7, 8, 9, 10, 11, 12, 13, 14, 15 or more). In some embodiments, all of the nucleotides of the sense strand and/or the antisense strand of the siRNA molecule are modified. In certain embodiments, the siRNA molecule can comprise one or more modified nucleotides and/or one or more modified internucleotide linkages. In some embodiments, the siRNA molecule may comprise modified internucleotide linkages at the first and second internucleoside linkages at the 5′ end of the siRNA molecule sense strand. In some embodiments, the siRNA molecule may comprise modified internucleotide linkages at the first and second internucleoside linkages at the 5′ and 3′ ends of the siRNA molecule antisense strand. In some embodiments, the siRNA molecule may comprise modified internucleotide linkages at the first and second internucleoside linkages at the 5′ end of the siRNA molecule sense strand and at the first and second internucleoside linkages at the 5′ and 3′ ends of the siRNA molecule antisense strand.

[0150] In some embodiments, the modified nucleotide may comprise a modified sugar moiety (e.g., a 2′ modified nucleotide). In some embodiments, the siRNA molecule can comprise one or more 2′ modified nucleotides, e.g., a 2′-deoxy, 2′-fluoro (2′-F), 2′-O-methyl (2′-O-Me), 2′-O-methoxyethyl (2′-MOE), 2′-O-aminopropyl (2′-O-AP), 2′-O-dimethylaminoethyl (2′-O-DMAOE), 2′-O-dimethylaminopropyl (2′-O-DMAP), 2′-O-dimethylaminoethyloxyethyl (2′-O-DMAEOE), or 2′-O-N-methylacetamido (2′-O-NMA). In various embodiments, each nucleotide of the siRNA molecule can a modified nucleotide (e.g., a 2′-modified nucleotide). In some embodiments, the siRNA molecule may comprise one or more phosphorodiamidate morpholinos. In some embodiments, each nucleotide of the siRNA molecule consists of a phosphorodiamidate morpholino.

[0151] In various embodiments, the siRNA molecule may comprise a phosphorothioate or other modified internucleotide linkage. In various embodiments, the siRNA molecule may comprise, e.g., a phosphorothioate internucleoside linkage(s). In some embodiments, the siRNA molecule may comprise a phosphorothioate internucleoside linkage(s) between two or more nucleotides. In some embodiments, the siRNA molecule may comprise a phosphorothioate internucleoside linkage(s) between all nucleotides. In some embodiments, the siRNA molecule may comprise modified internucleotide linkages at the first, second, and/or third internucleoside linkage at the 5′ or 3′ end of the siRNA molecule. In some embodiments, the siRNA molecule may comprise modified internucleotide linkages at the first and second internucleoside linkages at the 5′ and/or 3′ end of the siRNA molecule. In some embodiments, the siRNA molecule may comprise modified internucleotide linkages at the first and second internucleoside linkages at the 5′ end of the siRNA molecule sense strand. In some embodiments, the siRNA molecule may comprise modified internucleotide linkages at the first and second internucleoside linkages at the 5′ and 3′ ends of the siRNA molecule antisense strand. In some embodiments, the siRNA molecule may comprise modified internucleotide linkages at the first and second internucleoside linkages at the 5′ end of the siRNA molecule sense strand and at the first and second internucleoside linkages at the 5′ and 3′ ends of the siRNA molecule antisense strand. In some embodiments, the siRNA molecule may comprise modified internucleotide linkages at the first internucleoside linkage at the 5′ and 3′ ends of the siRNA molecule sense strand, at the first, second, and third internucleoside linkages at the 5′ end of the siRNA molecule antisense strand, and at the first internucleoside linkage at the 3′ end of the siRNA molecule antisense strand.

[0152] In some embodiments, the inhibitor is a short hairpin RNA (shRNA). A “small hairpin RNA” or “short hairpin RNA” or “shRNA” described herein may include a short RNA sequence that makes a tight hairpin turn that can be used to silence gene expression via RNA interference. The shRNAs provided herein may be chemically synthesized or transcribed from a transcriptional cassette in a DNA plasmid. The shRNA hairpin structure may be cleaved by the cellular machinery into siRNA, which is then bound to the RNA-induced silencing complex (RISC).

[0153] Non-limiting examples of shRNAs include a double-stranded polynucleotide molecule assembled from a single-stranded molecule, where the sense and antisense regions are linked by a nucleic acid-based or non-nucleic acid-based linker; and a double-stranded polynucleotide molecule with a hairpin secondary structure having self-complementary sense and antisense regions. In some embodiments, the sense and antisense strands of the shRNA are linked by a loop structure comprising from about 1 to about 25 nucleotides, from about 2 to about 20 nucleotides, from about 4 to about 15 nucleotides, from about 5 to about 12 nucleotides, or 1, 2, 3, 4, 5, 6, 7, 8, 9, 10, 11, 12, 13, 14, 15, 16, 17, 18, 19, 20, 21, 22, 23, 24, 25, or more nucleotides.

[0154] In some embodiments, the inhibitor of RNF213 protein expression comprises a site-specific nuclease. In some embodiments, the site-specific nuclease comprises a DNA nuclease such as an engineered (e.g., programmable or targetable) DNA nuclease to induce genome editing of a target DNA sequence of RNF213. Any suitable DNA nuclease can be used including, but not limited to, CRISPR-associated protein (Cas) nucleases, zinc finger nucleases (ZFNs), transcription activator-like effector nucleases (TALENs), meganucleases, other endo- or exo-nucleases, variants thereof, fragments thereof, and combinations thereof.

[0155] In some embodiments, the inhibitor of RNF213 protein expression is an antisense oligonucleotide (ASO). An ASO can downregulate a target, for example, by steric hindrance of ribosomal activity, by causing RNase H endonuclease cleavage of a target RNA, or by altering splicing or by inhibiting 5′ cap formation. An ASO can generally comprise a short nucleotide sequence which is substantially complementary to a target nucleotide sequence in a pre-mRNA molecule, an mRNA molecule, or a heterogeneous nuclear RNA (hnRNA). The degree of complementarity (or substantial complementarity) of the antisense sequence can be such that a molecule comprising the antisense sequence may form a stable double-stranded hybrid with the target nucleotide sequence in the RNA molecule. Without wishing to be bound by theory, “complementarity” of nucleic acids can mean that a nucleotide sequence in one strand of nucleic acid, e.g., due to orientation of its nucleobase groups, forms hydrogen bonds with another sequence on an opposing nucleic acid strand. The complementary bases in DNA are generally A paired with T and C paired with G. In RNA, the complementary bases are generally C with paired with G and U paired with A. Complementarity can be perfect or substantial/sufficient. Perfect complementarity between two nucleic acids means that the two nucleic acids can form a duplex in which every base within the duplex is bonded to a complementary base by Watson-Crick pairing. “Substantial” or “sufficient” complementarity means that a sequence in one strand is not completely and/or perfectly complementary to a sequence in an opposing strand but that sufficient bonding takes place between bases on the two strands to form a stable hybrid complex in set of hybridization conditions (e.g., temperature and/or salt concentration). Such conditions can be determined by, e.g., empirical determination of Tₘ (melting temperature) by employing routine methods in the art or by using the sequences and standard mathematical calculations to predict the Tₘ of hybridized strands. Tₘ can include the temperature at which a population of hybridization complexes formed between two nucleic acid strands are 50% denatured (i.e., a population of double-stranded nucleic acid molecules becomes half dissociated into single strands). At a temperature below the Tₘ, formation of a hybridization complex can be favored, while at a temperature above the Tₘ, melting or separation of the strands in the hybridization complex can be favored.

[0156] In some embodiments, an ASO is a morpholino or a gapmer.

[0157] Antisense oligonucleotides can be synthetic and chemically modified.

[0158] In some embodiments, antisense oligonucleotides may be 100% complementary to the target sequence, or may comprise mismatches. so long as a heteroduplex formed between the oligonucleotide and the target sequence is sufficiently stable to tolerate the action of modes of degradation which may occur in vivo, e.g., by way of cellular nucleases. Mismatches, if present, are generally less destabilizing toward the end regions of the hybrid duplex than in the middle. The number of mismatches permitted can depend on, e.g., the percentage of G:C base pairs in the duplex, the length of the oligonucleotide, and/or the position of the mismatch(es) in the duplex, according to principles of duplex stability within the knowledge of one skilled in the art. In some embodiments, an oligonucleotide may have about 70% to about 100% sequence complementarity, e.g., 70%, 71%, 72%, 73%, 74%, 75%, 76%, 77%, 78%, 79%, 80%, 81%, 82%, 83%, 84%, 85%, 86%, 87%, 88%, 89%, 90%, 91%, 92%, 93%, 94%, 95%, 96%, 97%, 98%, 99% or 100% sequence complementarity, between the oligonucleotide and the target sequence.

### RNF213 Protein Degraders

[0159] In some embodiments, degrading RNF213 protein comprises administering to the subject an effective amount of a proteolysis targeting chimera (PROTAC) or a molecular glue.

[0160] Proteolysis targeting chimeras (PROTACs) are bifunctional molecules that combine a ligand for an E3 ligase with a second ligand that targets a protein of interest and catalyze its polyubiquitination and eventual proteasomal degradation. Both ends of the PROTACs are connected via a linker. First generation PROTACs used peptides to recruit a protein of interest to E3 ligases, but subsequent ones have relied on smaller and more cell-permeable synthetic ligands. These include hydroxyproline derivatives and molecules derived from thalidomide, which bind the von Hippel-Lindau protein (VHL) and cereblon (CRBN), respectively. VHL and CRBN are the substrate receptors of two cullin-RING ubiquitin ligase (CRL) complexes, namely CRL2^{VHL} and CRL4^{CRBN}.

[0161] Molecular glues are small molecule protein degraders that are capable of inducing interactions between an E3 ubiquitin ligase and a protein, thereby resulting in ubiquitination and degradation of the protein. Without wishing to be bound by theory, upon binding to a protein, a molecular glue can induce a conformational change and render the small molecule-protein complex a “neo-substrate” for E3 ligase. Following the formation of a ternary complex, the “neo-substrate” is ubiquitinated, which leads to ubiquitin-proteasome system (UPS)-mediated protein degradation. Non-limiting examples of molecular glues are anti-cancer aryl-sulfonamides, e.g., Indisulam and CR-83 (a CDK inhibitor). In some embodiments, a molecular glue can drive protein degradation by making novel interactions between ubiquitin ligases and neo-substrates.

### EXAMPLES

[0162] The following examples are provided to further describe some of the embodiments disclosed herein. The examples are intended to illustrate, not to limit, the disclosed embodiments.

### Example 1. Y1275 Phosphorylation of RNF213 is Regulated by PTP1B/ABL, which Promotes RNF213 Oligomerization

[0163] HER2+ breast cancer cells with PTPN1 knockdown or treated with a PTP1B inhibitor are hypersensitive to hypoxia²². However, by studying an expanded panel of breast cancer cell lines, hypoxia hypersensitivity is not limited to the HER2+ subtype; treatment with the allosteric PTP1B inhibitor claramine also caused hypoxia hypersensitivity in several ER+ and triple negative breast cancer (TNBC) lines (FIG. 7A, FIG. 20). Hence, PTP1B is more general regulator of the hypoxia response, at least in breast cancer cells and possibly in other malignancies.

[0164] RNF213 is basally tyrosine phosphorylated in HER2+ breast cancer cells and interacts with PTP1B. “Substrate-trapping” mutants of PTP1B show increased RNF213 binding, and this interaction is competed by the active site PTP inhibitor sodium orthovanadate, suggesting that RNF213 is a PTP1B substrate²². However, RNF213 tyrosine phosphorylation is not increased in PTP1B-inhibited/deficient HER2+ breast cancer cells, indicating that only select sites are PTP1B targets. An RNF213-TurboID fusion protein was generated with the goal of identifying RNF213 binding partners by proximity ligation³⁵, labelled interacting proteins with biotin, enriched these proteins on streptavidin beads, performed on-bead tryptic digestion, and analyzed the peptide mixture by mass spectrometry (MS). This analysis also revealed evidence of RNF213 phosphorylation on residue Y1275 (FIG. 7B and Tables 7-9).

[0165] CRISPR/Cas9 was used to generate RNF213-knockout (KO) BT474 cells and retroviral gene transduction to introduce PTPN1 or non-targeting (Control) shRNAs. This verified that phosphorylation was relevant for RNF213/PTP1B interaction. The cells were transduced with a lentivirus expressing hemagglutinin (HA) tagged-mouse Ptpn1^{D/A}, which encodes the substrate-trapping mutant PTP1B^{D181A} (HA-PTP1B^{D/A}). The resultant lines were transfected with expression vectors for 3×-FLAG-RNF213 or 3×-FLAG-RNF213^{Y1275F}. Immunoprecipitation (IP) of HA-PTP1B^{D/A} resulted in recovery of 3×-FLAG-RNF213, while recovery of 3×-FLAG-RNF213^{Y1275F} was reduced markedly (FIG. 1A, right panel), even though it was expressed at comparable levels to wild-type RNF213 (FIG. 1A, left panel). Similar results were obtained from analogous experiments with AU565-derived cell lines (FIG. 7C). Tyrosine phosphorylation of 3×-FLAG-RNF213^{Y1275F} was decreased compared with that of 3×-FLAG-RNF213, but to a lesser extent (˜40%) than the near total decrease in its recovery in HA-mPTP1B^{D/A} immunoprecipitates (FIG. 1B and FIG. 7D). These data suggest that additional tyrosine phosphorylation sites exist in RNF213 that are not detected by MS or that new sites are generated in RNF213^{Y1275F}. Regardless, the results disclosed herein indicate that RNF213-Y1275 is a specific site for PTP1B-catalyzed dephosphorylation.

[0166] PTP1B deficiency/inhibition markedly increases overall cellular ubiquitylation, dependent on RNF213²². Yet Y1275 is distant from the RING or RZ domains in the monomeric RNF213 structure²⁶, arguing against direct regulation. The hypothesis that phosphorylation affects RNF213 oligomerization was tested by co-transfecting expression vectors for 3×-FLAG-RNF213 or 3×-FLAG-RNF213^{Y1275F} and GFP-RNF213 and performing anti-FLAG immunoprecipitations. Notably, recovery of GFP-RNF213 in 3×-FLAG-RNF213^{Y1275F} immunoprecipitates was impaired in BT474 (FIG. 1C) and AU565 cells (FIG. 7E).

[0167] The kinase(s) that phosphorylate(s) RNF213-Y1275 were investigated. ABL family kinase inhibitors (dasatinib, asciminib) abrogated the hypoxia hypersensitivity of BT474 PTPN1-KO cells and SKBR3 PTPN1-KO cells (FIG. 1D and FIG. 8A). Dasatanib treatment (compared to treatment with DMSO vehicle alone) also dramatically reduced the recovery of RNF213 in PTP1B trapping mutant immunoprecipates from these cells (FIG. 1E, right panel and FIG. 8B) and reduced overall RNF213 tyrosine phosphorylation to an extent similar to that caused by Y1275F mutation (FIG. 1F and FIG. 8C). Whether ABL1 phosphorylates RNF213 in vitro was evaluated. Immunopurified FLAG IPed 3×-FLAG-RNF213 and 3×-FLAG-RNF213^{Y1275F} (FIG. 8D) were incubated with recombinant His-tagged ABL1. Indeed, His-ABL1 phosphorylated WT-RNF213, but not RNF213^{Y1275F} in a time- and ABL1-concentration-dependent manner (FIG. 1G and FIG. 8E). Conversely, GST-PTP1B dephosphorylated ABL1-phosphorylated RNF213 (FIG. 8G). Furthermore, ABL1/2 siRNA-treated cells were resistant to hypoxia hypersensitivity induced by PTP1B deficiency (FIG. 1H). Similar results were observed using parental and PTPN1-KO MDA-MB-361 cells (FIG. 8F). It was determined that RNF213 Y1275 phosphorylation is regulated by PTP1B and ABL1/2, and phosphorylation of this site promotes RNF213 oligomerization and hypoxia hypersensitivity.

### Example 2. RNF213 Interacts with CYLD and SPATA2

[0168] RNF213-interacting proteins were identified to evaluate how RNF213 regulates hypoxia sensitivity (FIG. 2A). TurboID-RNF213 (“N-Turbo”), RNF213-TurboID (“C-Turbo”), or TurboID alone (Control Turbo) were recombined into HeLa FlpIn-TRex RNF213-KO cells. These cells were labelled with biotin for 10 min., and biotinylated proteins were recovered on streptavidin, digested with trypsin, and analyzed by MS (FIG. 2A). Proteins were ranked as potential binding partners by using the SAINT express algorithm³⁶ Immunoblotting (FIG. 9A) and silver staining (FIG. 9B) confirmed that similar amounts of each sample were submitted for analysis. Relatively few proteins labelled by N-Turbo were labelled to an extent greater than their labeling by Control-Turbo (FIG. 9C). By contrast, in the C-Turbo experiment, PTP1B (PTPN1) and USP15 (blue-colored arrows), previously reported to interact with RNF213^{22,37}, as well as several new proteins were significantly enriched over the control sample (FIG. 2B and Tables 10-12). Among the other top candidates were the major K63-deubiquitinase and NF-κB regulator CYLD and its interacting protein SPATA2 (FIG. 2B, orange-colored arrows). Notably, RNF213/CYLD interaction was recently reported, although its biological significance was not determined³⁸. Other top C-Turbo interactors included proteins involved in VEGF signaling, which is induced in hypoxia (FLII, MYOF^{39,40}), inflammation and atherosclerosis (MAP4K4, SPTLC1^{41,42}), lipotoxicity (SPTLC1, ALDH1B1^{43,44}), ischemia response (CPEB4⁴⁵), and stroke (SARS2⁴⁶). Top N-Turbo interactors included CYP51A1, which plays a crucial role in cholesterol metabolism and atherosclerosis⁴⁷. Pathway analysis suggests involvement of RNF213 in K63-linked deubiquitylation, cytokine (including interferon)-mediated signaling, innate immunity, necroptotic cell death, and cytoskeletal regulation (FIGS. 9D and 9E).

[0169] Given their role in NF-κB response, inflammation, and innate immunity, the CYLD/SPATA2 interaction with RNF213 was evaluated. Immunoblotting confirmed the interaction of C-Turbo, but not Turbo alone, with CYLD, SPATA2, and PTP1B; neither Turbo protein interacted with ERK2, which served as a control for non-specific biotinylation (FIG. 2C). CYLD and SPATA2 also co-immunoprecipitated with 3×-FLAG-RNF213 expressed by transient transfection of BT474-RNF213-KO-shPTPN1 cells (FIG. 2D). CRISPR/Cas9 technology and two independent sgRNAs were used to delete each gene in BT474 and BT474 PTPN1-KO cells. Remarkably, CYLD-KO or SPATA2-KO sensitized BT474 cells to hypoxia even more than PTPN1-KO alone (FIG. 2E). Similar results were obtained when analogous SKBR3-derived cell lines were studied (FIGS. 10A and 10B). Hence, RNF213 interacts with CYLD and SPATA2, and CYLD and SPATA2 (and, most likely, the CYLD/SPATA2 complex) prevent hypoxia hypersensitivity in breast cancer cell lines.

### Example 3. RNF213 Uses its RZ Domain to Ubiquitylate CYLD and SPATA2

[0170] ALFA-tagged SPATA2 or CYLD and HA-Ubiquitin (HA-UB) in parental or RNF213-KO BT474 cells were co expressed to test whether CYLD and SPATA2 are RNF213 substrates. The cells were treated with claramine (10 μM) or vehicle (FIG. 3A). Co-transfection of UB resulted in an increase in HA-reactive species, which were enhanced further in ALFA-CYLD- or ALFA-SPATA2-expressing cells. Comporting with prior studies²², claramine treatment led to an increase in overall ubiquitylation (FIG. 3A, left panel). Recovery of each ALFA-tagged protein, followed by anti-HA immunoblotting, revealed RNF213-dependent ubiquitylation of CYLD and SPATA2, which was enhanced by PTP1B inhibition (FIG. 3A, right panel). Analogous results were obtained using AU565 cells (FIG. 10C).

[0171] 3×FLAG-tagged RNF213 and various RNF213 mutants were purified from HeLa FlpIn-TRex RNF213-KO cells (FIG. 10D top, bottom), and assessed the ability of each protein to ubiquitylate CYLD and SPATA2 in vitro using UBE1 as the E1 enzyme and UBE2L3 as the E2. Consistent with the transfection studies, SPATA2 and CYLD, when tested alone or in equimolar concentrations, were ubiquitinated by 3×FLAG-RNF213 (FIG. 3B). As noted above, RNF213 has two potential ubiquitin ligase domains (RING, RZ). There was no significant ubiquitylation of CYLD or SPATA2 when an RZ mutant (“RZ-dead”) form of RNF213 (RNF213^{H4509A}) was tested (FIG. 3D). Surprisingly, however, both proteins showed increased ubiquitylation when the RING mutant RNF213^{H4014A} (RING-dead) was assayed (compared with WT RNF213). Based on these results, it was hypothesized that the RING negatively regulates the RZ domain. The ubiquitylation activity of WT RNF213 was compared to RNF213^{H4014A/H4509A} (RING/RZ-dead); however, RING/RZ-dead was unable to ubiquitylate CYLD/SPATA2 (FIG. 3E). Therefore, RNF213 is an E3-ubiquitin ligase for CYLD and SPATA2, their ubiquitylation is catalyzed by the RZ domain, and the RING can restrain RZ activity. CYLD and SPATA2 ubiquitylation were reduced (but not eliminated) when K63R-UB was used as the substrate (FIGS. 10G and 10H). Therefore, RNF213 catalyzes CYLD and SPATA2 ubiquitylation; the RZ catalyzes ubiquitylation with a preference for K63 of UB; and the RING restrains RZ activity. Furthermore, RING-dead (or RING-impaired) mutations are RNF213 RZ gain-of-function mutants; notably, highly penetrant MMD SNPs map to the RING domain.

[0172] It was reported that RING-dead RNF213 or highly penetrant MMD SNPs decrease global ubiquitylation in HeLa or 293T cells and appear to act as dominant negative alleles. By contrast, the disclosure provided herein suggests that RING-dead RNF123 is an RZ gain-of-function mutation, which might be expected to increase global ubiquitylation. In an attempt to resolve this apparent discrepancy, 3×FLAG-RNF213 or RNF213 mutants were co-expressed with HA-Ubiquitin (HA-UB) in HeLa Flp-In-TRex RNF213-KO cells (FIG. 10E) and subjected these cells to normoxia or hypoxia (0.1% O₂ for 24 hours). A sharp decrease in global ubiquitylation with the RING-dead mutant was observed; however, global ubiquitylation also was decreased in cells expressing RZ-dead or RING- and RZ-dead RNF213. Similar results were observed in experiments with BT474 RNF213-KO cells reconstituted with RNF213 or various RNF213 mutants (FIG. 10F). These data suggest that RING and RZ domain each have unique substrates, and that negative regulation of the RZ domain by the RING is probably substrate specific. Alternatively, the RZ domain could regulate targets that, in concert, perturb global ubiquitylation.

### Example 4. The RNF213 RZ and ATPase Domains Promote Hypoxia Hypersensitivity Via Degradation of SPATA2 and CYLD

[0173] BT474 RNF213-KO (or AU565-RNF213-KO) cells were reconstituted with WT RNF213, RNF213^{Y1275F}, RNF213^{K2775A} (second AAA-ATPase domain mutant), RNF213^{H4014A} (RING-dead), RNF213^{H4509A} (RZ-dead), RNF213^{H4014A/H4509A} (RING/RZ-dead) or RNF213^{K2775A/H4014A} (ATPase/RZ-dead) to determine which RNF213 domains are required for hypoxia hypersensitivity. CRISPR/Cas9 was used to generate PTPN1-KO pools of each cell line. The resultant cell lines/pools were subjected to hypoxia, and lysates were analyzed by immunoblotting. WT RNF213, but not RNF213^{Y1275F} promoted CYLD and, to a lesser extent, SPATA2 degradation in BT474 (FIG. 4A) and AU565 cells (FIG. 11A). Consistent with post-translational regulation, CYLD/SPATA2 degradation was enhanced in cycloheximide (CHX)-treated cells that expressed WT RNF213 compared with those expressing RNF213Y1275 (FIG. 11F, lanes 3, 6). Chloroquine (CQ), but not MG132, blocked CYLD/SPATA2 degradation in the presence of CHX, indicating lysosomal degradation (FIG. 11F, lanes 3, 7, 8). Moreover, degradation was increased by PTP1B deficiency. RZ-dead or RING/RZ-dead RNF213 were unable to promote CYLD or SPATA2 degradation, whereas compared with WT RNF213, the RING-dead mutant enhanced degradation (FIG. 4B and FIG. 11B), especially in the PTPN1-KO background. Previous work showed that RNF213 ATPase activity is required for RZ domain-mediated ubiquitin ligase activity²⁹. Given the finding that RING-dead mutations show RZ domain gain-of function, it was hypothesized that an active ATPase domain should also be required for substrate degradation by RING-dead mutants. Indeed, a compound ATPase/RING domain mutant (RNF213^{K2775A/H4014A}) was unable to degrade CYLD or SPATA2 in the presence or absence of PTP1B (FIG. 4C and FIG. 11C). The effects of select MMD SNPs that affect the RING domain of RNF213^{23,48,49} was tested by restoring doxycycline-inducible expression of RNF213^{C3997Y} (highly penetrant) and RNF213^{R4810K} (most common, low penetrance) to RNF213-KO BT474 and AU565 cells. The highly penetrant MMD SNP had similar effects on SPATA2 and CYLD to RING-dead RNF213 (FIG. 4D and FIG. 11D).

[0174] The effect of each mutant on hypoxia sensitivity in the presence or absence of PTPN1-KO was tested. Consistent with the above biochemical results, cells reconstituted with tyrosine phosphorylation site-, ATPase-, RZ-, compound ATPase/RZ-, or compound RING/RZ-, mutants failed to show hypoxia hypersensitivity in response to PTP1B deficiency (FIG. 4E and FIG. 11E). By contrast, RING-dead RNF213 or highly penetrant MMD SNPs showed increased hypoxic cell death even in PTP1B-replete cells and almost no survival upon PTPN1 deletion. The low penetrant, common MMD SNP RNF213^{R4810K} also showed increased cell death in hypoxia in the PTP1B-replete state, although hypersensitivity was not further enhanced by PTPN1 deletion (FIG. 4E, and FIG. 11E). Without wishing to be bound by theory, the R4810K mutation interferes with transmission of the stimulatory effect of Y1275 phosphorylation/oligomerization to the RZ domain. The data described herein indicates that tyrosine phosphorylation of RNF213 promotes ATPase-mediated oligomerization and activation of the RZ domain ubiquitin ligase activity, which in turn leads to CYLD/SPATA2 ubiquitylation, degradation, and cell death. The RING domain inhibits the RZ domain, and MMD SNPs abrogate this regulation and promote increased CYLD/SPATA2 degradation and hypoxia hypersensitivity.

### Example 5. The LUBAC Complex Also is Required for CYLD/SPATA2 Degradation by RNF213

[0175] Recently, the RZ domain was found to ubiquitylate Salmonella lipopolysaccharide, most likely on its lipid component²⁹. The LUBAC complex then catalyzes further ubiquitylation, promoting bacterial clearance via autophagy. Knockdown of the LUBAC complex component RBCK1 prevented WT-RNF213-catalyzed degradation of CYLD and SPATA2 even in PTP1B-depleted BT474 or AU565 cells (FIG. 5A and FIG. 12A). The LUBAC complex was dispensable for CYLD/SPATA2 degradation by RING-dead RNF213. RBCK1 knockdown was unable to prevent hypoxia-hypersensitivity caused by reconstituting RNF213-KO cells with the RING-dead mutant (FIG. 5B and FIG. 12B).

### Example 6. RNF213, Via its RZ Domain, Promotes NF-κB Activation and Primes Cells for Pyroptosis

[0176] CYLD and SPATA2 are important negative regulators of NF-κB, so CYLD/SPATA2 degradation would be expected to increase NF-κB activity. A dual luciferase reporter assay was used to monitor NF-κB activity in RNF213-KO BT474 and AU565 cells reconstituted with WT RNF213 and various mutants with or without concomitant pooled PTPN1 deletion. RNF213-KO cells (Vector) failed to increase reporter activity when PTP1B was depleted, while reconstituting these cells with WT-RNF213 increased reporter activity in PTPN1-KO cells to levels similar to that of parental BT474 cells with PTPN1 deletion. RING-dead RNF213-reconstituted cells had markedly increased NF-κB activity even when PTPN1 was intact, and activity increased further upon PTPN1 deletion. Consistent with their effects on CYLD/SPATA2, RZ mutant, RING/RZ mutant, or ATPase/RZ mutant forms of RNF213 failed to induce NF-κB under any condition and might even have a dominant negative effect (FIG. 5C and FIG. 12C).

[0177] CYLD promotes apoptosis and necroptosis^{50,51}, and NF-κB typically promotes cancer cell survival⁵². Yet PTP1B depletion or inhibition increases cell death in hypoxia, while promoting CYLD degradation and enhancing NF-κB activity. The mechanism that PTP1B-deficient, hypoxic cells die, was evaluated by testing the effects of known inhibitors of various cell death pathways. Neither ferroptosis nor necroptosis inhibitors blocked hypoxia hypersensitivity in PTPN1-KO cells; however, the general caspase inhibitor Z-VAD-FMK prevented hypoxia-induced cell death (FIG. 5D). Similar results were obtained using SKBR3 or MDA-MB-361 cells (FIGS. 12D and 12E).

[0178] No increase in apoptosis (a caspase-dependent process) was previously observed in PTP1B-deficient breast cancer cells; instead, death appeared to be necrotic²². However, Z-VAD-FMK also inhibits “inflammatory caspases” (Caspases 1,4,5 in humans, Caspases 1 and 11 in mouse). Remarkably, treatment with VX765 (1 μM), a specific inhibitor of Caspase 1 and Caspase 4, completely blocked hypoxic cell death in PTPN1-KO BT474 cells (FIG. 5E). Similar results were observed using MDA-MB-361 cells (FIG. 12F).

[0179] NF-κB induces the expression of the inflammasome component NLRP3, as well as IL1B. The inflammasome, in turn, facilitates pro-IL-1β cleavage and release of the active cytokine, as well as the cleavage of Gasdermins⁵³. Cleaved Gasdermins oligomerize and form pores in cell membranes, leading to pyroptotic cell death. Notably, hypoxia hypersensitivity of PTPN1-KO BT474 or MDA-MB-361 cells was also blocked by treatment with the NLRP3 inhibitor MCC950 (FIG. 5F and FIG. 12G) or by knockout of GSDMD with either of two sgRNAs (FIG. 5G and FIG. 12H). PTPN1-KO also increased IL-1b production in RNF213-WT-reconsituted BT474 or AU565 cells (FIG. 5H and FIG. 121). IL-10 levels increased even further in cells expressing RING-dead RNF213, but there was no detectable increase in cells expressing RNF213 that cannot be tyrosine phosphorylated (Y1275F) or in RZ-dead, ATPase-dead, RING-dead and RZ-dead or RING-dead and ATPase-dead mutants. Increased release of IL-1β and LDH from other cancer cells treated with PTP1B inhibitor was also detected (FIG. 20, FIGS. 12J and 12K).

### Example 7. Hypoxia-Driven ER Stress Sends the Second Signal for Pyroptotic Cell Death

[0180] NF-κB can prime cells for pyroptosis, but a “second signal” is required to trigger inflammasome assembly/inflammatory caspase activation, Gasdermin cleavage, and cell death. Several stimuli can provide the second signal, including ER stress, which is evoked by O₂ levels ≤1%⁵⁴. Remarkably, PTPN1-KO cells treated with the IRE1α inhibitor 4m8c were resistant to hypoxic cell death compared with DMSO control-treated cells (FIG. 6A). Similar results were obtained using MDA-MB-361 cells (FIG. 13A) or by treating PTPN1-KO BT474 or MDA-MB-361 cells with the PERK inhibitor GSK2606414 (FIG. 6B and FIG. 13B). Parental BT474 cells and BT474 cells rendered SPATA2- and CYLD-deficient were treated to test whether ER stress is sufficient to send the second signal. The cells were treated to mimic the effects of PTP1B deficiency in hypoxia (by CYLD-KO and SPATA2 siRNA) with tunicamycin or thapsigargin in normoxia. Both agents induced cell death selectively in SPATA2- and CYLD-deficient cells (FIG. 6C). Analogous results were obtained using cognate MDA-MB-361 cells (FIG. 13C). Moreover, the ER stress markers ERN1 (encoding IRE1α, HSPA5 (BIP)), and DDIT3 (CHOP) were induced in hypoxic HER2+ breast cancer cells regardless of their PTP1B status (FIGS. 13D and 13E). CHOP is also implicated as an effector of ER stress-induced cell death and inflammation; notably, DDIT3 knockdown partially (but incompletely) reversed hypoxia hypersensitivity in PTPN1-KO cells (FIG. 13F). By contrast, ER stress did not affect NF-κB reporter activity or target gene expression in PTPN1-KO BT474 or MDA-MB-361 cells (FIGS. 13G-13J). Another known pyroptosis activator, nigericin, also caused cell death in normoxic parental and SPATA2/CYLD-deficient BT474 cells (FIGS. 13K and 13L).

### Example 8. RNF213 Triggers Pyroptosis in HER2+ Breast Tumors

[0181] Finally, to explore the pathophysiological relevance of the above-described observations, parental, PTPN1-KO, CYLD-KO, and PTPN1-KO-CYLD-KO BT474 and MDA-MB-361 cells were implanted into athymic nu nu mice and tumor development was monitored. Absence of PTP1B, CYLD, or both, markedly inhibited tumor growth (FIG. 6D and FIG. 21A). Importantly, NLRP3 deletion was epistatic to PTPN1 deficiency, establishing the essentiality of the inflammasome for inhibiting tumor growth (FIG. 6D, PTPN-KO sgNLRP3). PTPN1-KO, CYLD-KO or PTPN1/CYLD-KO BT474- and MDA-MB-361-derived tumors showed increased necrosis (by H&E staining) compared with those from parental or PTPN1-KO/NLRP3-KO cells, even though the former were much smaller (FIG. 6E, left panels, quantified at right and FIG. 21B). Consistent with these findings (and in vitro experiments described herein), tumor cores were hypoxic (as indicated by HIF1α and EF5 staining, FIG. 21C), and ER stress genes were induced (FIG. 21D). By contrast, Ki67 and EdU staining were unaffected by tumor cell genotype (FIGS. 21C and 21E).

[0182] To determine which RNF213 domains are required for tumor death, RNF213-KO sgPTPN1 BT474 cells reconstituted with doxycycline-inducible WT RNF213, RNF213^{Y275F}, RNF213^{H4014A}, or RNF213^{H4509A} were implanted. Tumors were allowed to establish, but when volumes reached ˜100 mm³, mice were switched to doxycycline (Dox)-containing chow to induce WT or mutant RNF213 expression. Expression of WT or RING-dead RNF213 impaired tumor growth; by contrast, tumors expressing phosphosite- or RZ-dead mutant-reconstituted cells grew like RNF213-KO tumors (FIG. 6F and FIG. 21E). WT RNF213- and RNF213^{H4014A}-reconstituted tumors showed marked necrosis (FIG. 6G, left panels, quantified at right). Immunoblots of xenograft lysates confirmed that PTPN1- or CYLD-KO induced cleaved CASP1 and cleaved GSDMD (FIGS. 6H and 61), indicating pyroptotic cell death.

[0183] Described herein includes unique mechanisms of inflammatory cell death in breast cancer cells exposed to hypoxia (FIG. 14). RNF213, the product of the major susceptibility gene for MMD, was found to be phosphorylated at Y1275. Y1275 phosphorylation promotes RNF213 oligomerization, and is reciprocally regulated by ABL1,2 and PTP1B. Oligomerization activates the RNF213 RZ domain to catalyze CYLD/SPATA2 ubiquitylation and degradation. The LUBAC complex also is required for RNF213-initiated degradation of CYLD/SPATA2, but this requirement is abrogated in MMD SNPs or by engineered mutants that inactivate the RNF213 RING. Decreased CYLD/SPATA2 levels lead to increased NF-κB activation in hypoxia, which promotes NLRP3 transcription. A second signal, most likely hypoxia-induced ER stress, promotes inflammasome assembly and activation, leading to pro-IL-1β processing/secretion and GSDMD-dependent pyroptotic cell death. The results described herein provide new insights into the hypoxia response, RNF213 regulation, and MMD pathogenesis. The pathway revealed here, possibly in concert with other RNF213 interactors identified by proximity ligation screen, could also contribute to more common disorders, such as myocardial infarction/stroke and lipotoxicity (e.g., hepatic steatosis).

[0184] Hypoxic regions in tumors typically are therapy-resistant and provide a cellular reservoir for tumor recurrence^{3,7}. PTP1B inhibition or degradation (e.g., using PROTAC technology⁵⁵) can kill these hypoxic cells and could be useful in combination with other anti-neoplastics. NF-κB signaling is activated in hypoxia through IKKβ, but the detailed mechanism has remained unclear. Scholz et al.⁵⁶ reported that components of the TRAF6 complex (OTUB, UVEV1a) associate with PHD1 and that multiple NF-κB pathway components are ubiquitylated. The results described herein indicate that hypoxia also promotes NF-κB activation via degradation of a major deubiquitylase complex. HPV-infected cells activate NF-κB in hypoxia via CYLD degradation⁵⁷. Degradation requires E6, but not E6AP, the ubiquitin ligase that typically mediates E6 action.

[0185] Importantly, PTP1B inhibition/deficiency induces pyroptosis, an inflammatory form of cell death, which could help “turn cold tumors hot” and promote the anti-tumor immune response⁵³. Inflammation also can suppress tumor immunity⁵³; notably, PTP1B inhibition/deficiency increases IL-1β production, which promotes immunosuppression by myeloid cells⁵⁸. PTP1B also has direct effects in myeloid cells⁵⁹ and lymphocytes^{60,61}; whether the PTP1B/RNF213/CYLD/SPATA2 pathway is active in these cells remains unclear. A PTP1B/TCPTP inhibitor is in clinical trials as an anti-neoplastic agent³⁴ (NCT04777994), mainly because of its predicted immunostimulatory effects^{60,62}. Elucidating the cell-autonomous and non-autonomous effects of such agents, including if/how TCPTP inhibition affects RNF213, should aid in their rational deployment. It also will be important to test whether PTP1B controls hypoxia sensitivity in other tumor types, particularly pancreas cancer, which is notoriously hypoxic⁶³.

[0186] Most previous studies of RNF213 have focused on its E3-ubiquitin ligase domains, although it is known that its E3 ligase activity requires ATPase function and, most likely, hexamerization²⁹. Oligomerized RNF213 serves as a sensor for ISG15⁶⁴; however, reciprocal control of Y1275 phosphorylation by ABL1/2 and PTP1B is the first example of a signaling pathway regulating RNF213 oligomerization/E3 activation. The RZ domain, previously implicated in lipid ubiquitylation, was found to have protein targets (CYLD/SPATA2).

[0187] The results described herein also yield several new clues into MMD pathogenesis. RNF213-catalyzed CYLD/SPATA2 degradation provides a mechanistic explanation for earlier reports that RNF213, and to a greater extent, MMD-associated SNPs, activate NF-κB³⁰. MMD is characterized by precocious carotid occlusions and stroke. The most common RNF213 SNPs activate the RZ domain and confer LUBAC-independence on CYLD/SPATA2 degradation (and consequently, NF-κB activation and increased inflammation) could explain how these alleles promote vascular disease. MMD is also associated with Graves' disease, systemic lupus erythematosus, Sjögren's syndrome, multiple sclerosis, rheumatoid arthritis, and other immune/inflammatory disorders^{65,66}. Bypassing the LUBAC complex requirement for CYLD/SPATA2 degradation/NF-κB signaling could help explain these associations.

[0188] Finally, disordered regulation of SPATA2/CYLD and possibly other RNF213 interactors could be relevant to more common diseases and might be targeted therapeutically. For example, RNF213 deficiency abrogates lipotoxicity caused by saturated fatty acids in vitro³². Saturated fatty acids also can provide the “second signal” for pyroptosis⁶⁷ and induce ER stress⁶⁸. In some embodiments, RNF213 degraders, ATPase inhibitors, or RZ inhibitors might have therapeutic benefit in, for example, non-alcoholic fatty acid disease. Several other RNF213 interactors (MAP4K4, SPTLC1, SARS2) are associated with atherosclerotic disorders including stroke.

### Example 9. The Number of Drug-Tolerant Persister Cells (DTPs) Following HER2 Inhibitor Treatment is Reduced in RNF213 Knockout (KO) BT474 Cells as Compared to Wild Type RNF213 BT474 Cells

[0189] As shown in FIG. 16, RNF213 KO cells show a significant reduction in cell number compared to wild type RNF213. Samples including 4×10⁶ BT474 and BT474 RNF213-KO cells were seeded on a 10 cm plate. 24 hours after seeding, cells were treated with HER2 inhibitors tucatinib and lapatinib for 14 days at either 1.2 μM or 2.5 μM. After 14 days, remaining viable cells were counted. These results indicate that RNF213-KO cells are less likely to form drug-tolerant persister cells (DTPs) post HER2 inhibitor treatment which is the prescribed drug for treating HER2+ BC patients.

### Example 10. TNK1 Phosphorylates RNF213 and Positively Regulates RNF213 Activity

[0190] Previously, it has been reported that RNF213 increases global ubiquitylation in absence or inhibition of PTP1B. Since TNK1 is a major tyrosine kinase that could affect global ubiquitylation as it directly binds to ubiquitin, whether TNK1 regulates global ubiquitination in PTP1B inhibited cells was tested. The results showed that TNK1-KD suppressed the increased global ubiquitylation in PTP1B inhibited cells (FIG. 17).

[0191] Since RNF213 promotes hypoxia hypersensitivity in PTPN1-KO cells, the effects of TNK1-KD in PTPN1-KO cells on hypoxia hypersensitivity was tested. The results suggested that TNK1-KD impaired the hypoxia hypersensitivity of BT474 PTPN1-KO cells (top) and MDA-MB-361 PTP1B-KO cells (bottom) (FIG. 18).

[0192] Further, whether the effects of TNK1 on hypoxia viability were regulated through RNF213 phosphorylation was tested. For this, purified RNF213 was subjected to an in vitro kinase assay. The results suggested that TNK1 phosphorylates RNF213 in a dose dependent manner (FIG. 19).

[0193] Overall, results described in the present Example suggest that TNK1 phosphorylates RNF213 and positively regulates RNF213 activity.

[0194] Below are the methods used in the Examples described above.

### Cell Culture and Cell Line Generation

[0195] Sources of the breast cancer cell lines used here were described⁶⁹; all are maintained as frozen stocks by the Neel Laboratory. Except where indicated, cells were cultured in DMEM+10% FBS with 100 U/ml penicillin and 100 mg/ml streptomycin at 37° C. in 5% CO₂ and tested monthly for mycoplasma by PCR.

TABLE 1
Cell lines

| | | |
|---|---|---|
| HeLa Flp-In-TRex | DMEM | +10% FBS |
| HEK293T | DMEM | +10% FBS |
| BT474 | DMEM | +10% FBS |
| SKBR3 | DMEM | +10% FBS |
| MDA-MB-361 | DMEM | +10% FBS |
| AU565 | DMEM | +10% FBS |
| MCF7 | DMEM | +10% FBS |
| CAMA1 | DMEM | +10% FBS |
| MDA-MB-175 | DMEM | +10% FBS |
| MDA-MB-134 | DMEM | +10% FBS |
| BT20 | DMEM | +10% FBS |
| MDA-MB-453 | DMEM | +10% FBS |
| MDA-MB-157 | DMEM | +10% FBS |
| MDA-MB-468 | DMEM | +10% FBS |
| HPAC | RPMI | +10% FBS |
| SW1990 | DMEM | +10% FBS |
| KATO III | RPMI | +20% FBS, |
| | | 2 mM |
| | | Glutamine |
| SNU 16 | RPMI | +10% FBS |
| FaDu | DMEM | +10% FBS |

[0196] Isogenic HeLa Flp-In T-Rex RNF213-KO cells that inducibly express wild-type RNF213 or RNF213 variants in response to doxycycline (DOX) were generated by co-transfecting pcDNA5/FRT/TO-based expression constructs with 3×-Flag tagged RNF213 or RNF213 variant with pOG44, which directs constitutive expression of Flp recombinase (FLP). were selected by adding hygromycin B (200 μg/ml) 48 hours post-transfection. Single cell clones of RNF213-deleted HeLa, BT474, and AU565 cells, or of PTPN1-deleted BT474, SKBR3, and MDAMB361 cells, were generated by using CRISPR/Cas9 technology⁷⁰. Briefly, sgRNAs targeting each gene were cloned into the BbsI site of pSpCas9 (BB)-2A-Puro (PX459; Addgene), and cells were transfected with each clone using Lipofectamine™ 3000 Transfection Reagent (ThermoFisher Scientific). After 48 hours, cells were diluted into 96-well plates (1 cell/well) containing 48-hour conditioned media from the same line in addition to standard media (1:1). Knockout clones were confirmed by immunoblotting. The sgRNA sequences are shown in Table 2.

TABLE 2
siRNA and guide RNA (gRNA)

| | | SEQ | |
|---|---|---|---|
| siRNA and gRNA | | ID | |
| used in study | Target sequence | NO: | Catalog |
| sgRNF213 | ACAATGGCGTCGGCCTCGGA | 4591 | Synthesized from |
| | | | Millipore-Sigma |
| sgPTPN1 | ACCTTCGATCACAGCCAGGT | 4592 | Synthesized from |
| | | | Millipore-Sigma |
| sgCYLD#1 | AAAGCATGTTTTCAGCAACG | 4593 | Synthesized from |
| | | | Millipore-Sigma |
| sgCYLD#2 | TTCAACTAAGGAACTCCGGG | 4594 | Synthesized from |
| | | | Millipore-Sigma |
| sgSPATA2#1 | TCAACCTCTTCCTCTACCCG | 4595 | Synthesized from |
| | | | Millipore-Sigma |
| sgSPATA2#2 | CAGATCCACGTCATCCTGAG | 4596 | Synthesized from |
| | | | Millipore-Sigma |
| sgGSDMD#1 | AGGTTGACACACTTATAACG | 4597 | Synthesized from |
| | | | Millipore-Sigma |
| sgGSDMD#2 | CAGGGATGAACTCCCCACCA | 4598 | Synthesized from |
| | | | Millipore-Sigma |
| sgNLRP3 | GATCGCAGCGAAGATCCACA | 4601 | Synthesized from |
| | | | Millipore-Sigma |
| shPTPN1 | CCGCCCAAAGGAGTTACATTC | 4599 | Synthesized from |
| | | | Millipore-Sigma |
| shPtpn1 | CCGCCCAGAGGAGCTATATTC | 4600 | Synthesized from |
| | | | Millipore-Sigma |
| siABL1 | — | — | ON-TARGETplus |
| | | | SMARTpool Human |
| | | | ABL1 siRNA cat. no. L- |
| | | | 003100-00-0005 |
| siABL2 | — | — | ON-TARGETplus |
| | | | SMARTpool Human |
| | | | ABL2 siRNA cat. no. L- |
| | | | 003101-00-0005 |
| siRBCK1 | — | — | ON-TARGETplus |
| | | | SMARTpool Human |
| | | | RBCKI siRNA cat. |
| | | | no. L-006932-00-0005 |
| siRNF31 | — | — | ON-TARGETplus |
| | | | SMARTpool Human |
| | | | RNF31 siRNA cat. no. |
| | | | L-021419-00-0005 |
| siDDIT3 | — | — | ON-TARGETplus |
| | | | SMARTpool Human |
| | | | DDIT3 siRNA cat. no. |
| | | | L-004819-00-0005 |
| siSPATA2 | — | — | ON-TARGETplus |
| | | | SMARTpool Human |
| | | | SPATA2 siRNA cat. no. |
| | | | L-020065-02-0005 |

[0197] Piggbac (PB)-based transposon expression was used to re-express WT RNF213 or RNF213 variants under Dox control in RNF213-KO BT474 and RNF213-KO AU565 cells. Briefly, PB-TA-ERN (Addgene)-based expression constructs containing RNF213 and RNF213 variants were co-transfected with transposase expression vector, and integrants were selected by adding G418 (800 μg/ml). RNF213 expression was induced by adding 0.5 gig/ml Dox.

[0198] PTPN1 depletion was accomplished by stable shRNA knockdown using pSUPER-Puro-based retroviral vectors. RBCK1, ABL1, and ABL2 siRNA (Horizon Discovery) were introduced using Lipofectamine™ RNAiMAX reagent (ThermoFisher Scientific). Pooled knockout lines were generated by infection with lentiviruses expressing CAS9 and appropriate sgRNAs. Lentiviruses and retroviruses were packaged as described⁷¹.

### Viability Assays

[0199] Cells were seeded in 6-well plates (2×10⁶/well for MDAMB361, 1.5×10⁶/well for other lines) and maintained in at 37° C., 500 CO₂. After 24 hours, viable cell number was determined by Trypan Blue exclusion, and fresh media was added to replicates placed in a standard incubator (normoxia) and in hypoxic conditions (0.1% O₂, Whitley H35 Hypoxystation). Viable cells were counted at various times, as indicated.

### Generation of RNF213 Mutants

[0200] RNF213 mutants were generated by PCR or by using fragments synthesized by Genewiz/IDT. Fragments containing the desired mutation were sequenced, digested, and cloned into wild-type RNF213 plasmids by using T4 DNA ligase or via Gibson assembly⁷².

### NF-κB Reporter Assays

[0201] Cells co-transfected with an NF-κB reporter construct (p2×-NF-κB-BS-Luc-Firefly, a generous gift of Dan Littman, NYU Grossman School of Medicine) and pCMV-Renilla, were subjected to 0.1% O₂ for the indicated times. Firefly and Renilla luciferase was measured using the Dual-Luciferase® Reporter Assay System (Promega) according to the manufacturer's instructions. Reporter activity was quantified as the ratio of Firefly/Renilla signal, and all signals were normalized to the signal in parental BT474 cells.

### IL-1β Assays

[0202] Cell supernatants were collected at the indicated times, and IL-1 levels were quantified by using the Lumit™ IL-10 Immunoassay (Promega), according to manufacturer's instructions.

### Biochemical Assays

### Immunoblotting and Immunoprecipitations

[0203] Cells were lysed in RIPA (total cell lysates, ALFA-tag precipitations) or NP40 buffer (co-immunoprecipitations); buffer compositions and immunoprecipitation conditions are described below²⁷. ALFA-tagged proteins were recovered using a single domain camelid antibody bound to magnetic beads (NanoTag Biotechnologies). Antibody details and concentrations used are summarized in Table 3.

TABLE 3
Antibodies and related reagents

| Antibodies against | | | |
|---|---|---|---|
| protein used | Vendor | Catalog | Dilution |
| RNF213 | ThermoFisher Scientific | # PA5-51902 | 1:1000 |
| RNF213 | Millipore Sigma | ABC1391 | 1:1000 |
| PTP1B | Biotechne-RnD Systems | AF1366 | 1:1000 |
| HA | Cell Signaling Technology | 3724S | 1:1000 |
| FLAG | Millipore Sigma | F1804-1MG | 1:2000 |
| CYLD | Cell Signaling Technology | 8462S | 1:1000 |
| SPATA2 | Santacruz | sc-515283 | 1:500 |
| ERK2 | Santacruz | sc-1647 | 1:2000 |
| Vinculin | Santacruz | sc-73614 | 1:2000 |
| GSDMD | Cell Signaling Technology | 39754S | 1:1000 |
| V5 | Cell Signaling Technology | 1320S | 1:1000 |
| ALFA | NanoTag Biotechnologies | N1582 | 1:1000 |
| pY | Millipore Sigma | 05-321 | 1:1000 |
| ABL1 | Santacruz | sc-56887 | 1:1000 |
| ABL2 | ThermoFisher Scientific | XD3571172 | 1:1000 |
| V5 | Santacruz | sc-271944 | 1:1000 |
| GFP | Cell Signaling Technology | 2555S | 1:1000 |
| Cleaved Caspase1 | Cell Signaling Technology | 4199 | 1:1000 |
| Cleaved GSDMD | Cell Signaling Technology | 36425 | 1:1000 |
| RIPK3/RIP3 | Fisher Scientific | MAB7604SP | 1:1000 |
| Antibody | | | |
| pMLKL | Millipore Sigma | 91689 | 1:1000 |
| Cleaved Caspase3 | Cell Signaling Technology | 9661 | 1:1000 |
| EF5, Alexa Fluor ® | Millipore Sigma | EF5010-250UG | — |
| 488 conjugate | | | |
| Ki67 | NYU Pathology Core | | — |
| HIF-1a | NYU Pathology Core | | — |
| Beads | Vendor | Catalog | — |
| Streptavidin beads | Fisher Scientific | PI20357 | — |
| FLAG M2 beads | Millipore Sigma | MM823 | — |
| HA-beads | ThermoFisher Scientific | 26181 | — |
| ALFA-beads | NanoTag Biotechnologies | N1511 | — |
| Glutathione | Cytiva | 17075601 | — |
| Sepharose 4B beads | | | |

### Proximity-Based Labelling

[0204] Cells were cultured in standard media but with 10% tetracycline (Tet)-free FBS (Clonetech) for at least 1 week. Tet-free/biotin-free FBS was generated by incubating Tet-free FBS with sterile streptavidin beads overnight followed by centrifugation to remove the beads. N-Turbo, C-Turbo, and Turbo proteins were induced by adding 1 μg/ml Dox to cells for 36 hours. For the last ten min. of incubation, 500 μM of biotin was added to the medium. Labelling reactions was terminated by removing the medium and adding ice-cold PBS to plates, which were kept on ice. Lysates were collected in RIPA buffer without Na-deoxycholate, and biotin-labelled proteins were collected by incubating with high-capacity streptavidin agarose beads for 4 hours at 4° C. Comparable protein amounts (assessed by silver stain and avidin blotting) were analyzed by MS.

### Purification of RNF213 and RNF213 Variants

[0205] HeLa RNF213-KO cells expressing RNF213 or RNF213 variants (except RNF213^{H4509A}) were induced with 0.5 μg/ml Dox for 4 days. The 3×-FLAG-RNF213^{H4509A} variant was transiently transfected into HeLa RNF213-KO cells, as the stable expression of this variant was low. Lysates from ten 15 cm plates were subjected to anti-FLAG immunoprecipitation. RNF213 species were eluted with 3×-FLAG peptide and concentrated by passage through an Amicon Ultra-4 Centrifugal Filter (100 kDa cut-off).

### In Vitro Ubiquitylation Assays

[0206] Ubiquitylation assays were performed as described²⁷. Briefly, 0.25 μM of purified RNF213 or RNF213 variant were incubated with 2.5 μM GST-SPATA2 (Abnova) or 2.5 μM 6×His-CYLD (R&D) in E3-Ligase buffer (R&D) along with 50 μM HA-Ub, 100 nM UBE1 (E1), 1 μM UBE2L3 (E2), and 10 mM Mg-ATP (all from Boston Biochem) for 30 min. in a total reaction volume of 25 μl. Reactions were terminated by adding SDS-PAGE sample buffer followed by incubation for 5 min. at 95° C.

### In Vitro Kinase Assays

[0207] Purified full-length 3×-FLAG-tagged RNF213 or RNF213^{Y1275F} were mixed with varying amounts of bacterially produced His-ABL1 (as indicated) and incubated with 600 ng of RNF213 in kinase assay buffer (50 mM HEPES [pH 7.5], 10 mM MgCl₂, 2.5 mM DTT, 75 μM ATP) for varying times, as indicated. Final reaction volumes were 20 μl. Reactions were terminated by adding SDS-PAGE sample buffer followed by incubation for 5 min. at 95° C.

### Mass Spectrometry

[0208] Proteins collected on streptavidin beads were digested with sequencing grade trypsin and analyzed by LC/MS/MS using a Thermo Scientific EASY-nLC 1200 and a Thermo Scientific Orbitrap Eclipse Mass Spectrometer MS/MS spectra were searched against the Uniprot human database with the addition of the sequences of RNF213 with TurboID at the N- and C-terminus using Sequest within Proteome Discoverer 1.4. MS/MS spectra were also searched using Byonic by Protein Metrics specifically to identify phosphorylation sites on RNF213.

### Quantification and Statistical Analysis

[0209] Graphs were generated and statistical analyses were performed using GraphPad Prism9. Multiple groups were compared by two-way ANOVA, with additional Tukey multiple comparisons test. Two group comparisons were evaluated by two-tailed t test. Values represent the mean of experiments, with error bars representing S.E.M.

### Immunoblotting, Immunoprecipitation, and SDS-PAGE

[0210] For co-immunoprecipitations, cells were lysed in NP40 buffer (50 mM Tris-HCl [pH 8], 150 mM NaCl, 2 mM EDTA, 10 mM Na₄P₂O₇, 100 mM NaF, 2 mM Na₃VO₄, 1% [vol/vol] NP-40, 40 μg/ml phenylmethyl sulfonyl fluoride, 2 μg/ml antipain, 2 μg/ml pepstatin A, 20 μg/ml leupeptin, and 20 μg/ml aprotinin). For streptavidin affinity purifications and standard immunoprecipitations, modified RIPA buffer (50 mM Tris-HCl [pH 8], 150 mM NaCl, 2 mM EDTA, 10 mM Na₄P₂O₇, 100 mM NaF, 2 mM Na₃VO₄, 10% [vol/vol] NP-40, 0.10% (wt/vol) SDS, 40 μg/ml phenylmethyl sulfonyl fluoride, 2 μg/ml antipain, 2 μg/ml pepstatin A, 20 μg/ml leupeptin, and 20 μg/ml aprotinin) was used for cell lysis. For detection of ubiquitylated species in vivo, 10 mM N-ethylmaleimide (NEM) and 10 mM iodoacetamide (IAM) were added to the lysis buffer.

[0211] For immunoblotting of whole cell lysates, equal amounts of protein per sample were subjected to SDS-PAGE and transferred to polyvinylidene fluoride (PVDF) membranes (Millipore). For immunoprecipitation of FLAG-tagged proteins, lysates were incubated with anti-FLAG-magnetic beads for 4 hours on a rotator-mixer at 4° C. For immunoprecipitation of HA-tagged proteins, lysates were incubated with anti-HA-agarose beads for 4 hours on a rotator-mixer at 4° C. For immunoprecipitation of ALFA-tagged proteins, lysates were incubated with ALFA-selector ST agarose beads overnight on a rotor-mixer at 4° C. For recovery of biotinylated proteins, high-capacity streptavidin agarose resin (ThermoScientific) was added to lysates, which were rotated for 4 hours at 4° C. Beads were washed five times in lysis buffer, incubated in sample buffer at 95C for 5 min. and resolved by SDS-PAGE and immunoblotting. For in vitro ubiquitylation and phosphorylation using purified RNF213 and RNF213 variants, proteins were eluted from beads by incubation with an excess of 3×-FLAG peptide. Lysates and immunoprecipitates were resolved by modified SDS-PAGE on 3-8% Tris-acetate gels (Novex) or 5% Tris-glycine gels. Gels were transferred in 1× transfer buffer, 10% methanol for 1 hour at 25 V using an XCell II Blot Module (Novex) and analyzed by acquisition software (Image Studio Lite), on an Odyssey Infrared imaging system (Li-Cor Biosciences). All antibodies used are listed in Table 3 above.

### Mass Spectrometry

[0212] Proteins bound to streptavidin agarose beads were washed with 100 mM NH₄HCO₃ (pH 8), reduced with 2.5 μL of 0.2M dithiothreitol at 57C for 1 hour, alkylated with 2.5 μL of 0.5M IAM for 45 min. at room temperature in the dark, and digested overnight at room temperature with 500 ng sequencing grade modified trypsin (Promega). After digestion, samples were acidified to a final concentration of 0.5% trifluoroacetic acid (TFA). A C18 cleanup was performed on all samples using Ultra-Micro SpinColumns (Harvard Apparatus). Briefly, samples were loaded onto equilibrated spin columns, rinsed with 0.1% TFA, and eluted with 40% acetonitrile/0.5% acetic acid and 80% acetonitrile/0.5% acetic acid. Organic solvent was removed using a SpeedVac concentrator, and all samples were reconstituted in 0.5% acetic acid.

[0213] One-third of each sample was analyzed individually by LC/MS/MS. Samples were separated online using a Thermo Scientific EASY-nLC 1200, where solvent A was 2% acetonitrile/0.5% acetic acid, and solvent B was 80% acetonitrile/0.5% acetic acid. A 60-min. gradient from 5-35% B was applied to all samples. Peptides were gradient-eluted directly to a Thermo Scientific Orbitrap Eclipse Mass Spectrometer. High resolution, full MS spectra were acquired with a resolution of 240,000, an AGC target of 1e6, a maximum ion time of 50 ms, and a scan range of 400 to 1500 m/z. Following each full MS scan, data dependent HCD MS/MS spectra collected with low resolution at top speed with a 3 ms cycle time. All MS/MS spectra were collected with a rapid scan in the ion trap, an AGC target of 2e4, a maximum ion time of 18 ms, one microscan, 0.7 m/z isolation window, auto scan range mode, and NCE of 27. MS/MS spectra were searched against the Uniprot human database using Sequest within Proteome Discoverer. 1.4. MS/MS spectra were also searched with Byonic by Protein Metrics against a database containing just RNF213 and common contaminants to identify phosphorylation sites.

[0214] For TurboID analyses, beads were washed two times with 100 mM NH₄HCO (pH 8). Samples were reduced with 2 μL of 0.2M dithiothreitol at 57C for 1 hour and alkylated with 2 μL of 0.5M IAM for 45 min. at room temperature in the dark. Samples were digested overnight at room temperature with 250 ng sequencing trypsin. After digestion, samples were acidified to a final concentration of 0.5% trifluoroacetic acid (TFA) and cleaned up on C18 columns as above.

[0215] One-third of each sample was analyzed individually by LC/MS/MS. LC conditions were identical to those above. High resolution full MS spectra were acquired with a resolution of 70,000, an AGC target of 1e6, a maximum ion time of 120 ms, and scan range of 400 to 1500 m/z. Following each full MS were 20 data-dependent high resolution HCD MS/MS spectra. All MS/MS spectra were collected with resolution of 17,500, an AGC target of 5e4, a maximum ion time of 120 ms, one microscan, 2 m/z isolation window, fixed first mass of 150 m/z, and NCE of 27. MS/MS spectra were searched against the Uniprot human database with the added sequences of RNF213 with the TurboID on the N- and C-terminus using Sequest within Proteome Discoverer 1.4.

[0216] Additional chemicals, kits, and reagents used in above-described methods are provided in Table 4. Examples of plasmids used in the above-described methods are provided in Table 5A. Examples of primers used in the above-described methods are provided in Table 5B.

TABLE 4
Chemicals and kits

| Chemical | Vendor | Catalog |
|---|---|---|
| Claramine trifuoroacetate salt | Millipore Sigma | SML1545-25MG |
| Crizotinib | MedChemExpress | HY-50878 |
| FAK inhibitor 14 | Millipore Sigma | SML0837-10MG |
| PP2 | MedChemExpress | HY-13805 |
| Saracatinib | Selleck | S1006 |
| Dasatinib | Selleck | S1021 |
| Asciminib | Selleck | S8555 |
| Biotin | Millipore Sigma | B4501 |
| Z-VAD-FMK | Selleck | S7023 |
| Ferrostatin-1 | Selleck | S7243 |
| Necrostatin | ThermoFisher | 23-241-0 |
| VX765 | Millipore Sigma | 5313720001 |
| MCC950 | Millipore Sigma | 5381200001 |
| 48 μC | MedChemExpress | HY-19701 |
| GSK2606414 | MedChemExpress | HY-18072 |
| Tunicamycin | Tocris Biosciences | 3516 |
| Thapsigargin | Cayman | 10522-5mg |
| Iodoacetamide | Millipore Sigma | I1149-5G |
| N-Ethylmaleimide | Millipore Sigma | 04259-5G |
| SM-164 | MedChemExpress | HY-15989 |
| EF5 | Millipore Sigma | SML1961 |
| Cyclohexamide | Millipore Sigma | C1988 |
| MG132 | Millipore Sigma | M7449 |
| Chloroquine | Millipore Sigma | C6628 |
| BODIPY ™ 581/591 C11 | ThermoFisher | D3861 |
| Nigericin sodium salt | Millipore Sigma | N7143-5MG |
| Doxocrubicin | Millipore Sigma | D5220 |
| Kit | Vendor | Catalog |
| Dual-Luciferase Reporter Assay System | Promega | E1910 |
| Lumit ™ Human IL-1beta immunoassay | Promega | W6010 |
| LDH-Glo ™ Cytotoxicity Assay | Promega | J2380 |
| Click-iT ™ EdU Cell Proliferation Kit for | ThermoFisher | C10340 |
| Imaging | | |
| Ni-NTA Spin Kit | Qiagen | 31314 |
| Reagent | Vendor | Catalog |
| His-ABL1 | Abcam | ab69810 |
| His-CYLD | R&D | E-556 |
| GST-SPATA2 | Abnova | H00009825-P01 |
| TNF-alpha/TNFSF2 MEDCHEM | MedChemExpress | HY-P7058 |
| Gateway ™ BP Clonase ™ II Enzyme mix | ThermoFisher | 11789020 |
| | Scientific | |
| Gateway ™ LR Clonase ™ II Enzyme mix | ThermoFisher | 11791020 |
| | Scientific | |

TABLE 5A
Plasmids

| Plasmids | Source |
|---|---|
| ALFA-SPATA2 | in this study |
| ALFA-CYLD | in this study |
| HA-Ptpn1-DA | in this study |
| pcDNA5-3x-FLAG-RNF213 | Used in Bhardwaj et al., 2022 |
| pcDNA5-3x-FLAG-RNF213^{Y1275F} | in this study |
| pcDNA5-3x-FLAG-RNF213^{H4014A} | Used in Bhardwaj et al., 2022 |
| pcDNA5-3x-FLAG-RNF213^{H4509A} | in this study |
| pcDNA5-3x-FLAG- | in this study |
| RNF213^{H4014A/H4509A} | |
| pcDNA5-GFP-RNF213 | in this study |
| pcDNA5-3x-FLAG-RNF213-TurboID | in this study |
| pcDNA5-TurboID-RNF213 | in this study |
| pcDNA5-V5-TurboID | in this study |
| pcDNA5-BirA | in this study |
| pcDNA5-BirA-RNF213 | in this study |
| PB-TA-ERN-RNF213 | in this study |
| PB-TA-ERN-RNF213^{Y1275F} | in this study |
| PB-TA-ERN-RNF213^{K2775A} | in this study |
| PB-TA-ERN-RNF213^{C3997Y} | in this study |
| PB-TA-ERN-RNF213^{H4014A} | in this study |
| PB-TA-ERN-RNF213^{H4509A} | in this study |
| PB-TA-ERN-RNF213^{R4810K} | in this study |
| PB-TA-ERN-RNF213^{H4014A/H4509A} | in this study |
| PB-TA-ERN-RNF213^{K2775A/H4014A} | in this study |
| p2X-NF-kB-BS-Luc-Firefly | NYU |
| pCMV-Renilla | NYU |
| HA-UB | Used in Bhardwaj et al., 2022 |

TABLE 5B
Primers

| Gene | Forward primer | SEQ ID | Reverse primer | SEQ ID | |
|---|---|---|---|---|---|
| Name | (5′->3′) | NO | (5′->3′) | NO | Vendor |
| IL1B | CAGAAGTACC | 4602 | GAAGCCCTTG | 4611 | Millipore Sigma |
| | TGAGCTCGCC | | CTGTAGTGGT | | |
| NLRP3 | GATCTTCGCTG | 4603 | GACGGGCATT | 4612 | Millipore Sigma |
| | CGATCAACA | | CCTGTCTTCA | | |
| DDIT3 | TTAAAGATGA | 4604 | ATTTTTGGAA | 4613 | Millipore Sigma |
| | GCGGGTGGCA | | AAGGGTAGG | | |
| | | | TTAAGT | | |
| HSPA5 | CACTCCTGAA | 4605 | ACCACCTTGA | 4614 | Millipore Sigma |
| | GGGGAACGTC | | ACGGCAAGA | | |
| | | | A | | |
| ERN1 | ACCAGCGTGG | 4606 | CTGGAATTGC | 4615 | Millipore Sigma |
| | TGATAGTTGG | | CGGTCCTTCT | | |
| CYLD | GTCCTGGGGA | 4607 | TCACACTCTC | 4616 | Millipore Sigma |
| | CACAATGCAG | | TGATAAAGCT | | |
| | | | GGG | | |
| SPATA2 | GATGGCTTTG | 4608 | TCCATTGAAC | 4617 | Millipore Sigma |
| | CAAGAGTCGG | | TGGGCTTCCC | | |
| RBCK1 | CAGGTGGCAA | 4609 | TAGAGGTAG | 4618 | Millipore Sigma |
| | TGAAGTGTGC | | GCACTGTCCC | | |
| | | | C | | |
| RNF31 | GAGTGACCGT | 4610 | TGTTGAGGTA | 4619 | Millipore Sigma |
| | GGTCTGAGTG | | GTTTCGGGGC | | |

### REFERENCES

[0217] 1. Bertout, J. A., Patel, S. A. & Simon, M. C. The impact of 02 availability on human cancer. Nat Rev Cancer 8, 967-975 (2008). doi.or2:10.1038/nrc2540
[0218] 2. Schofield, C. J. & Ratcliffe, P. J. Oxygen sensing by HIF hydroxylases. Nat Rev Mol Cell Biol 5, 343-354 (2004). doi.org:10.1038/nrm1366
[0219] 3. Singleton, D. C., Macann, A. & Wilson, W. R. Therapeutic targeting of the hypoxic tumour microenvironment. Nat Rev Clin Oncol 18, 751-772 (2021). doi.org:10.1038/s41571-021-00539-4
[0220] 4. Wouters, B. G. & Koritzinsky, M. Hypoxia signalling through mTOR and the unfolded protein response in cancer. Nat Rev Cancer 8, 851-864 (2008). doi.org:10.1038/nrc2501
[0221] 5. Cummins, E. P. et al. Prolyl hydroxylase-1 negatively regulates IkappaB kinase-beta, giving insight into hypoxia-induced NFkappaB activity. Proc Natl Acad Sci USA 103, 18154-18159 (2006). doi.or2:10.1073/pnas.0602235103
[0222] 6. Rius, J. et al. NF-kappaB links innate immunity to the hypoxic response through transcriptional regulation of HIF-1alpha. Nature 453, 807-811 (2008). doi.org:10.1038/nature06905
[0223] 7. Eltzschig, H. K., Bratton, D. L. & Colgan, S. P. Targeting hypoxia signalling for the treatment of ischaemic and inflammatory diseases. Nat Rev Drug Discov 13, 852-869 (2014). doi.org:10.1038/nrd4422
[0224] 8. Nizet, V. & Johnson, R. S. Interdependence of hypoxic and innate immune responses. Nat Rev Immunol 9, 609-617 (2009). doi.org:10.1038/nri2607
[0225] 9. Pakos-Zebrucka, K. et al. The integrated stress response. EMBO Rep 17, 1374-1395 (2016). doi.org:10.15252/embr.201642195
[0226] 10. Kroemer, G., Galluzzi, L., Kepp, O. & Zitvogel, L. Immunogenic cell death in cancer therapy. Annu Rev Immunol 31, 51-72 (2013). doi.or2:10.1146/annurev-immunol-032712-100008
[0227] 11. Eltzschig, H. K. & Carmeliet, P. Hypoxia and inflammation. N Engl J Med 364, 656-665 (2011). doi.org:10.1056/NEJMra0910283
[0228] 12. Frangioni, J. V., Beahm, P. H., Shifrin, V., Jost, C. A. & Neel, B. G. The nontransmembrane tyrosine phosphatase PTP-1B localizes to the endoplasmic reticulum via its 35 amino acid C-terminal sequence. Cell 68, 545-560 (1992). doi.org:10.1016/0092-8674(92)90190-n
[0229] 13. Haj, F. G., Verveer, P. J., Squire, A., Neel, B. G. & Bastiaens, P. I. Imaging sites of receptor dephosphorylation by PTP1B on the surface of the endoplasmic reticulum. Science 295, 1708-1711 (2002). doi.org:10.1126/science.1067566
[0230] 14. Elchebly, M. et al. Increased insulin sensitivity and obesity resistance in mice lacking the protein tyrosine phosphatase-1B gene. Science 283, 1544-1548 (1999). doi.org:10.1126/science.283.5407.1544
[0231] 15. Klaman, L. D. et al. Increased energy expenditure, decreased adiposity, and tissue-specific insulin sensitivity in protein-tyrosine phosphatase 1B-deficient mice. Mol Cell Biol 20, 5479-5489 (2000). doi.org:10.1128/MCB.20.15.5479-5489.2000
[0232] 16. Zabolotny, J. M. et al. PTP1B regulates leptin signal transduction in vivo. Dev Cell 2, 489-495 (2002). doi.org:10.1016/si534-5807(02)00148-x
[0233] 17. Cheng, A. et al. Attenuation of leptin action and regulation of obesity by protein tyrosine phosphatase 1B. Dev Cell 2, 497-503 (2002). doi.org:10.1016/s1534-5807(02)00149-1
[0234] 18. Bentires-Alj, M. & Neel, B. G. Protein-tyrosine phosphatase 1B is required for HER2/Neu-induced breast cancer. Cancer Res 67, 2420-2424 (2007). doi.org:10.1158/0008-5472.CAN-06-4610
[0235] 19. Julien, S. G. et al. Protein tyrosine phosphatase 1B deficiency or inhibition delays ErbB2-induced mammary tumorigenesis and protects from lung metastasis. Nat Genet 39, 338-346 (2007). doi.org:10.1038/ng1963
[0236] 20. Cancer Genome Atlas, N. Comprehensive molecular portraits of human breast tumours. Nature 490, 61-70 (2012). doi.org:10.1038/nature11412
[0237] 21. Wiener, J. R. et al. Overexpression of the protein tyrosine phosphatase PTP1B in human breast cancer: association with p185c-erbB-2 protein expression. J Natl Cancer Inst 86, 372-378 (1994). doi.or2:10.1093/jnci/86.5.372
[0238] 22. Banh, R. S. et al. PTP1B controls non-mitochondrial oxygen consumption by regulating RNF213 to promote tumour survival during hypoxia. Nat Cell Biol 18, 803-813 (2016). doi.org:10.1038/ncb3376
[0239] 23. Kamada, F. et al. A genome-wide association study identifies RNF213 as the first Moyamoya disease gene. J Hum Genet 56, 34-40 (2011). doi.org:10.1038/jh2.2010.132
[0240] 24. Nanba, R. et al. [Familial moyamoya disease--clinical features and current study]. No Shinkei Geka 32, 7-16 (2004).
[0241] 25. Nanba, R. et al. Clinical features of familial moyamoya disease. Childs Nerv Syst 22, 258-262 (2006). doi.org:10.1007/s00381-005-1230-5
[0242] 26. Ahel, J. et al. Moyamoya disease factor RNF213 is a giant E3 ligase with a dynein-like core and a distinct ubiquitin-transfer mechanism. Elife 9 (2020). doi.org:10.7554/eLife.56185
[0243] 27. Bhardwaj, A., Banh, R. S., Zhang, W., Sidhu, S. S. & Neel, B. G. MMD-associated RNF213 SNPs encode dominant-negative alleles that globally impair ubiquitylation. Life Sci Alliance 5 (2022). doi.org:10.26508/lsa.202000807
[0244] 28. Morito, D. et al. Moyamoya disease-associated protein mysterin/RNF213 is a novel AAA+ ATPase, which dynamically changes its oligomeric state. Sci Rep 4, 4442 (2014). doi.org:10.1038/srep04442
[0245] 29. Otten, E. G. et al. Ubiquitylation of lipopolysaccharide by RNF213 during bacterial infection. Nature 594, 111-116 (2021). doi.or2:10.1038/s41586-021-03566-4
[0246] 30. Takeda, M. et al. Moyamoya disease patient mutations in the RING domain of RNF213 reduce its ubiquitin ligase activity and enhance NFkappaB activation and apoptosis in an AAA+ domain-dependent manner. Biochem Biophys Res Commun 525, 668-674 (2020). doi.org:10.1016/j.bbrc.2020.02.024
[0247] 31. Sugihara, M. et al. The AAA+ ATPase/ubiquitin ligase mysterin stabilizes cytoplasmic lipid droplets. J Cell Biol 218, 949-960 (2019). doi.org:10.1083/jcb.201712120
[0248] 32. Piccolis, M. et al. Probing the Global Cellular Responses to Lipotoxicity Caused by Saturated Fatty Acids. Mol Cell 74, 32-44 e38 (2019). doi.org:10.1016/j.molcel.2019.01.036
[0249] 33. Habu, T. & Harada, K. H. UBC13 is an RNF213-associated E2 ubiquitin-conjugating enzyme, and Lysine 63-linked ubiquitination by the RNF213-UBC13 axis is responsible for angiogenic activity. FASEB Bioadv 3, 243-258 (2021). doi.org:10.1096/fba.2019-00092
[0250] 34. Baumgartner, C. K. et al. ABBV-CLS-484: An active site PTPN2/N1 inhibitor that augments the immune response and sensitizes tumors to immune-mediated killing. Cancer Research 82 (2022).
[0251] 35. Branon, T. C. et al. Efficient proximity labeling in living cells and organisms with TurboID. Nat Biotechnol 36, 880-887 (2018). doi.org:10.1038/nbt.4201
[0252] 36. Teo, G. et al. SAINTexpress: improvements and additional features in Significance Analysis of INTeractome software. J Proteomics 100, 37-43 (2014). doi.org:10.1016/j.jprot.2013.10.023
[0253] 37. Kotani, Y. et al. Alternative exon skipping biases substrate preference of the deubiquitylase USP15 for mysterin/RNF213, the moyamoya disease susceptibility factor. Sci Rep 7, 44293 (2017). doi.or2:10.1038/srep44293
[0254] 38. Louvrier, C. et al. RNF213-associated urticarial lesions with hypercytokinemia. J Allergy Clin Immunol 150, 1545-1555 (2022). doi.org:10.1016/j.jaci.2022.06.016
[0255] 39. Ruzehaji, N. et al. Attenuation of flightless I improves wound healing and enhances angiogenesis in a murine model of type 1 diabetes. Diabetologia 57, 402-412 (2014). doi.org:10.1007/s00125-013-3107-6
[0256] 40. Bematchez, P. N. et al. Myoferlin regulates vascular endothelial growth factor receptor-2 stability and function. J Biol Chem 282, 30745-30753 (2007). doi.org:10.1074/jbc.M704798200
[0257] 41. Roth Flach, R. J. et al. Endothelial protein kinase MAP4K4 promotes vascular inflammation and atherosclerosis. Nat Commun 6, 8995 (2015). doi.org:10.1038/ncomms9995
[0258] 42. Tamehiro, N. et al. SPTLC1 binds ABCA1 to negatively regulate trafficking and cholesterol efflux activity of the transporter. Biochemistry 47, 6138-6147 (2008). doi.org:10.1021/bi800182t
[0259] 43. Chaurasia, B. & Summers, S. A. Ceramides in Metabolism: Key Lipotoxic Players. Annu Rev Physiol 83, 303-330 (2021). doi.org:10.1146/annurev-physiol-031620-093815
[0260] 44. Chen, X. et al. A noncanonical function of EIF4E limits ALDH1B1 activity and increases susceptibility to ferroptosis. Nat Commun 13, 6318 (2022). doi.or2:10.1038/s41467-022-34096-w
[0261] 45. Kan, M. C. et al. CPEB4 is a cell survival protein retained in the nucleus upon ischemia or endoplasmic reticulum calcium depletion. Mol Cell Biol 30, 5658-5671 (2010). doi.or2:10.1128/MCB.00716-10
[0262] 46. Roux, C. J. et al. Phenotypic diversity of brain MRI patterns in mitochondrial aminoacyl-tRNA synthetase mutations. Mol Genet Metab 133, 222-229 (2021). doi.org:10.1016/j.vmgme.2021.04.004
[0263] 47. Rozman, D. Lanosterol 14alpha-demethylase (CYP51)—a cholesterol biosynthetic enzyme involved in production of meiosis activating sterols in oocytes and testis—a minireview. Pflugers Arch 439, r056-r057 (2000). doi.org:10.1007/s004240000090
[0264] 48. Liu, W. et al. Identification of RNF213 as a susceptibility gene for moyamoya disease and its possible role in vascular development. PLoS One 6, e22542 (2011). doi.org:10.1371/journal.pone.0022542
[0265] 49. Cecchi, A. C. et al. RNF213 rare variants in an ethnically diverse population with Moyamoya disease. Stroke 45, 3200-3207 (2014). doi.org:10.1161/STROKEAHA.114.006244
[0266] 50. Moquin, D. M., McQuade, T. & Chan, F. K. CYLD deubiquitinates RIP1 in the TNFalpha-induced necrosome to facilitate kinase activation and programmed necrosis. PLoS One 8, e76841 (2013). doi.org:10.1371/journal.pone.0076841
[0267] 51. Kovalenko, A. et al. The tumour suppressor CYLD negatively regulates NF-kappaB signalling by deubiquitination. Nature 424, 801-805 (2003). doi.org:10.1038/nature01802
[0268] 52. Taniguchi, K. & Karin, M. NF-kappaB, inflammation, immunity and cancer: coming of age. Nat Rev Immunol 18, 309-324 (2018). doi.org:10.1038/nri.2017.142
[0269] 53. Karki, R. & Kanneganti, T. D. Diverging inflammasome signals in tumorigenesis and potential targeting. Nat Rev Cancer 19, 197-214 (2019). doi.org:10.1038/s41568-019-0123-y
[0270] 54. Menu, P. et al. ER stress activates the NLRP3 inflammasome via an UPR-independent pathway. Cell Death Dis 3, e261 (2012). doi.org:10.1038/cddis.2011.132
[0271] 55. Dong, J. et al. Small Molecule Degraders of Protein Tyrosine Phosphatase 1B and T-Cell Protein Tyrosine Phosphatase for Cancer Immunotherapy. Angew Chem Int Ed Engl 62, e202303818 (2023). doi.org:10.1002/anie.202303818
[0272] 56. Scholz, C. C. et al. Regulation of IL-1beta-induced NF-kappaB by hydroxylases links key hypoxic and inflammatory signaling pathways. Proc Natl Acad Sci USA 110, 18490-18495 (2013). doi.org:10.1073/pnas.1309718110
[0273] 57. An, J. et al. Inactivation of the CYLD deubiquitinase by HPV E6 mediates hypoxia-induced NF-kappaB activation. Cancer Cell 14, 394-407 (2008). doi.org:10.1016/j.ccr.2008.10.007
[0274] 58. Jura, N., Archer, H. & Bar-Sagi, D. Chronic pancreatitis, pancreatic adenocarcinoma and the black box in-between. Cell Res 15, 72-77 (2005). doi.org:10.1038/sj.cr.7290269
[0275] 59. Grant, L. et al. Myeloid-cell protein tyrosine phosphatase-1B deficiency in mice protects against high-fat diet and lipopolysaccharide-induced inflammation, hyperinsulinemia, and endotoxemia through an IL-10 STAT3-dependent mechanism. Diabetes 63, 456-470 (2014). doi.org:10.2337/db13-0885
[0276] 60. Wiede, F. et al. PTP1B Is an Intracellular Checkpoint that Limits T-cell and CAR T-cell Antitumor Immunity. Cancer Discov 12, 752-773 (2022). doi.or2:10.1158/2159-8290.CD-21-0694
[0277] 61. Medgyesi, D. et al. The protein tyrosine phosphatase PTP1B is a negative regulator of CD40 and BAFF-R signaling and controls B cell autoimmunity. J Exp Med 211, 427-440 (2014). doi.org:10.1084/jem.20131196
[0278] 62. Stanford, S. M. & Bottini, N. Targeting protein phosphatases in cancer immunotherapy and autoimmune disorders. Nat Rev Drug Discov 22, 273-294 (2023). doi.org:10.1038/s41573-022-00618-w
[0279] 63. Chen, X., Zeh, H. J., Kang, R., Kroemer, G. & Tang, D. Cell death in pancreatic cancer: from pathogenesis to therapy. Nat Rev Gastroenterol Hepatol 18, 804-823 (2021). doi.org:10.1038/s41575-021-00486-6
[0280] 64. Thery, F. et al. Ring finger protein 213 assembles into a sensor for ISGylated proteins with antimicrobial activity. Nat Commun 12, 5772 (2021). doi.org:10.1038/s41467-021-26061-w
[0281] 65. Ohkubo, K. et al. Moyamoya disease susceptibility gene RNF213 links inflammatory and angiogenic signals in endothelial cells. Sci Rep 5, 13191 (2015). doi.or2:10.1038/srep13191
[0282] 66. Asselman, C., Hemelsoet, D., Eggermont, D., Dermaut, B. & Impens, F. Moyamoya disease emerging as an immune-related angiopathy. Trends Mol Med 28, 939-950 (2022). doi.org:10.1016/j.molmed.2022.08.009
[0283] 67. Karasawa, T. et al. Saturated Fatty Acids Undergo Intracellular Crystallization and Activate the NLRP3 Inflammasome in Macrophages. Arterioscler Thromb Vasc Biol 38, 744-756 (2018). doi.or2:10.1161/ATVBAHA.117.310581
[0284] 68. Wang, D., Wei, Y. & Pagliassotti, M. J. Saturated fatty acids promote endoplasmic reticulum stress and liver injury in rats with hepatic steatosis. Endocrinology 147, 943-951 (2006). doi.org:10.1210/en.2005-0570
[0285] 69. Marcotte, R. et al. Functional Genomic Landscape of Human Breast Cancer Drivers, Vulnerabilities, and Resistance. Cell 164, 293-309 (2016). doi.org:10.1016/j.cell.2015.11.062
[0286] 70. Ran, F. A. et al. Genome engineering using the CRISPR-Cas9 system. Nat Protoc 8, 2281-2308 (2013). doi.org:10.1038/nprot.2013.143
[0287] 71. Zhang, S. et al. Genetically Defined, Syngeneic Organoid Platform for Developing Combination Therapies for Ovarian Cancer. Cancer Discov 11, 362-383 (2021). doi.org:10.1158/2159-8290.CD-20-0455
[0288] 72. Gibson, D. G. et al. Enzymatic assembly of DNA molecules up to several hundred kilobases. Nat Methods 6, 343-345 (2009). doi.org:10.1038/nmeth.1318

TABLE 6
Amino acid sequences of RNF213 and listed domains of RNF213

| SEQ ID | |
|---|---|
| NO | Sequence (amino acid) |
| SEQ ID | MECPSCQHVSKEETPKFCSQCGERLPPAAPIADSENNNSTMASASEGEME |
| NO: 1 | CGQELKEEGGPCLFPGSDSWQENPEEPCSKASWTVQESKKKKRKKKKKG |
| [RNF213] | NKSASSELASLPLSPASPCHLTLLSNPWPQDTALPHSQAQQSGPTGQPSQPP |
| | GTATTPLEGDGLSAPTEVGDSPLQAQALGEAGVATGSEAQSSPQFQDHTE |
| | GEDQDASIPSGGRGLSQEGTGPPTSAGEGHSRTEDAAQELLLPESKGGSSE |
| | PGTELQTTEQQAGASASMAVDAVAEPANAVKGAGKEMKEKTQRMKQPP |
| | ATTPPFKTHCQEAETKTKDEMAAAEEKVGKNEQGEPEDLKKPEGKNRSA |
| | AAVKNEKEQKNQEADVQEVKASTLSPGGGVTVFFHAIISLHFPFNPDLHK |
| | VFIRGGEEFGESKWDSNICELHYTRDLGHDRVLVEGIVCISKKHLDKYIPY |
| | KYVIYNGESFEYEFIYKHQQKKGEYVNRCLFIKSSLLGSGDWHQYYDIVY |
| | MKPHGRLQKVMNHITDGPRKDLVKGKQIAAALMLDSTFSILQTWDTINLN |
| | SFFTQFEQFCFVLQQPMIYEGQAQLWTDLQYREKEVKRYLWQHLKKHVV |
| | PLPDGKSTDFLPVDCPVRSKLKTGLIVLFVVEKIELLLEGSLDWLCHLLTSD |
| | ASSPDEFHRDLSHILGIPQSWRLYLVNLCQRCMDTRTYTWLGALPVLHCC |
| | MELAPRHKDAWRQPEDTWAALEGLSFSPFREQMLDTSSLLQFMREKQHL |
| | LSIDEPLFRSWFSLLPLSHLVMYMENFIEHLGRFPAHILDCLSGIYYRLPGL |
| | EQVLNTQDVQDVQNVQNILEMLLRLLDTYRDKIPEEALSPSYLTVCLKLH |
| | EAICSSTKLLKFYELPALSAEIVCRMIRLLSLVDSAGQRDETGNNSVQTVFQ |
| | GTLAATKRWLREVFTKNMLTSSGASFTYVKEIEVWRRLVEIQFPAEHGWK |
| | ESLLGDMEWRLTKEEPLSQITAYCNSCWDTKGLEDSVAKTFEKCIIEAVSS |
| | ACQSQTSILQGFSYSDLRKFGIVLSAVITKSWPRTADNFDDILKHLLTLADV |
| | KHVFRLCGTDEKILANVTEDAKRLIAVADSVLTKVVGDLLSGTILVGQLEL |
| | IIKHKNQFLDIWQLREKSLSPQDEQCAVEEALDWRREELLLLKKEKRCVD |
| | SLLKMCGNVKHLIQVDFGVLAVRHSQDLSSKRLNDTVTVRLSTSSNSQRA |
| | THYHLSSQVQEMAGKIDLLRDSHIFQLFWREAAEPLSEPKEDQEAAELLSE |
| | PEEESERHILELEEVYDYLYQPSYRKFIKLHQDLKSGEVTLAEIDVIFKDFV |
| | NKYTDLDSELKIMCTVDHQDQRDWIKDRVEQIKEYHHLHQAVHAAKVIL |
| | QVKESLGLNGDFSVLNTLLNFTDNFDDFRRETLDQINQELIQAKKLLQDIS |
| | EARCKGLQALSLRKEFICWVREALGGINELKVFVDLASISAGENDIDVDRV |
| | ACFHDAVQGYASLLFKLDPSVDFSAFMKHLKKLWKALDKDQYLPRKLCD |
| | SARNLEWLKTVNESHGSVERSSLTLATAINQRGIYVIQAPKGGQKISPDTV |
| | LHLILPESPGSHEESREYSLEEVKELLNKLMLMSGKKDRNNTEVERFSEVF |
| | CSVQRLSQAFIDLHSAGNMLFRTWIAMAYCSPKQGVSLQMDFGLDLVTEL |
| | KEGGDVTELLAALCRQMEHFLDSWKRFVTQKRMEHFYLNFYTAEQLVYL |
| | STELRKQPPSDAALTMLSFIKSNCTLRDVLRASVGCGSEAARYRMRRVME |
| | ELPLMLLSEFSLVDKLRIIMEQSMRCLPAFLPDCLDLETLGHCLAHLAGMG |
| | GSPVERCLPRGLQVGQPNLVVCGHSEVLPAALAVYMQTPSQPLPTYDEVL |
| | LCTPATTFEEVALLLRRCLTLGSLGHKVYSLLFADQLSYEVARQAEELFHN |
| | LCTQQHREDYQLVMVCDGDWEHCYLPSAFSQHKVFVTPQAPLEAIQAYL |
| | AGHYRVPKQTLSAAAVFNDRLCVGIVASERAGVGKSLYVKRLHDKMKM |
| | QLNVKNVPLKTIRLIDPQVDESRVLGALLPFLDAQYQKVPVLFHLDVTSSV |
| | QTGIWVFLFKLLILQYLMDINGKMWLRNPCHLYIVEILERRTSVPSRSSSAL |
| | RTRVPQFSFLDIFPKVTCRPPKEVIDMELSALRSDTEPGMDLWEFCSETFQR |
| | PYQYLRRFNQNQDLDTFQYQEGSVEGTPEECLQHFLFHCGVINPSWSELR |
| | NFARFLNYQLRDCEASLFCNPSFIGDTLRGFKKFVVTFMIFMARDFATPSL |
| | HTSDQSPGKHMVTMDGVREEDLAPFSLRKRWESEPHPYVFFNDDHTTMT |
| | FIGFHLQPNINGSVDAISHLTGKVIKRDVMTRDLYQGLLLQRVPFNVDFDK |
| | LPRHKKLERLCLTLGIPQATDPDKTYELTTDNMLKILAIEMRFRCGIPVIIM |
| | GETGCGKTRLIKFLSDLRRGGTNADTIKLVKVHGGTTADMIYSRVREAEN |
| | VAFANKDQHQLDTILFFDEANTTEAISCIKEVLCDHMVDGQPLAEDSGLHI |
| | IAACNPYRKHSEEMICRLESAGLGYRVSMEETADRLGSIPLRQLVYRVHAL |
| | PPSLIPLVWDFGQLSDVAEKLYIQQIVQRLVESISLDENGTRVITEVLCASQ |
| | GFMRKTEDECSFVSLRDVERCVKVFRWFHEHSAMLLAQLNAFLSKSSVS |
| | KNHTERDPVLWSLMLAIGVCYHASLEKKDSYRKAIARFFPKPYDDSRLLL |
| | DEITRAQDLFLDGVPLRKTIAKNLALKENVFMMVVCIELKIPLFLVGKPGS |
| | SKSLAKTIVADAMQGPAAYSDLFRSLKQVHLVSFQCSPHSTPQGIISTFRQ |
| | CARFQQGKDLQQYVSVVVLDEVGLAEDSPKMPLKTLHPLLEDGCIEDDPA |
| | PHKKVGFVGISNWALDPAKMNRGIFVSRGSPNETELIESAKGICSSDILVQD |
| | RVQGYFASFAKAYETVCKRQDKEFFGLRDYYSLIKMVFAAAKASNRKPS |
| | PQDIAQAVLRNFSGKDDIQALDIFLANLPEAKCSEEVSPMQLIKQNIFGPSQ |
| | KVPGGEQEDAESRYLLVLTKNYVALQILQQTFFEGDQQPEIIFGSGFPKDQ |
| | EYTQLCRNINRVKICMETGKMVLLLNLQNLYESLYDALNQYYVHLGGQK |
| | YVDLGLGTHRVKCRVHPNFRLIVIEEKDVVYKHFPIPLINRLEKHYLDINT |
| | VLEKWQKSIVEELCAWVEKFINVKAHHFQKRHKYSPSDVFIGYHSDACAS |
| | VVLQVIERQGPRALTEELHQKVSEEAKSILLNCATPDAVVRLSAYSLGGFA |
| | AEWLSQEYFHRQRHNSFADFLQAHLHTADLERHAIFTEITTFSRLLTSHDC |
| | EILESEVTGRAPKPTLLWLQQFDTEYSFLKEVRNCLTNTAKCKILIFQTDFE |
| | DGIRSAQLIASAKYSVINEINKIRENEDRIFVYFITKLSRVGRGTAYVGFHG |
| | GLWQSVHIDDLRRSTLMVSDVTRLQHVTISQLFAPGDLPELGLEHRAEDG |
| | HEEAMETEASTSGEVAEVAEEAMETESSEKVGKETSELGGSDVSILDTTRL |
| | LRSCVQSAVGMLRDQNESCTRNMRRVVLLLGLLNEDDACHASFLRVSKM |
| | RLSVFLKKQEESQFHPLEWLAREACNQDALQEAGTFRHTLWKRVQGAVT |
| | PLLASMISFIDRDGNLELLTRPDTPPWARDLWMFIFSDTMLLNIPLVMNNE |
| | RHKGEMAYIVVQNHMNLSENASNNVPFSWKIKDYLEELWVQAQYITDAE |
| | GLPKKFVDIFQQTPLGRFLAQLHGEPQQELLQCYLKDFILLTMRVSTEEEL |
| | KFLQMALWSCTRKLKAASEAPEEEVSLPWVHLAYQRFRSRLQNFSRILTIY |
| | PQVLHSLMEARWNHELAGCEMTLDAFAAMACTEMLTRNTLKPSPQAWL |
| | QLVKNLSMPLELICSDEHMQGSGSLAQAVIREVRAQWSRIFSTALFVEHVL |
| | LGTESRVPELQGLVTEHVFLLDKCLRENSDVKTHGPFEAVMRTLCECKET |
| | ASKTLSRFGIQPCSICLGDAKDPVCLPCDHVHCLRCLRAWFASEQMICPYC |
| | LTALPDEFSPAVSQAHREAIEKHARFRQMCNSFFVDLVSTICFKDNAPPEK |
| | EVIESLLSLLFVQKGRLRDAAQRHCEHTKSLSPFNDVVDKTPVIRSVILKLL |
| | LKYSFHDVKDYIQEYLTLLKKKAFITEDKTELYMLFINCLEDSILEKTSAYS |
| | RNDELNHLEEEGRFLKAYSPASRGREPANEASVEYLQEVARIRLCLDRAA |
| | DFLSEPEGGPEMAKEKQCYLQQVKQFCIRVENDWHRVYLVRKLSSQRGM |
| | EFVQGLSKPGRPHQWVFPKDVVKQQGLRQDHPGQMDRYLVYGDEYKAL |
| | RDAVAKAVLECKPLGIKTALKACKTPQSQQSAYFLLTLFREVAILYRSHN |
| | ASLHPTPEQCEAVSKFIGECKILSPPDISRFATSLVDNSVPLLRAGPSDSNLD |
| | GTVTEMAIHAAAVLLCGQNELLEPLKNLAFSPATMAHAFLPTMPEDLLAQ |
| | ARRWKGLERVHWYTCPNGHPCSVGECGRPMEQSICIDCHAPIGGIDHKPR |
| | DGFHLVKDKADRTQTGHVLGNPQRRDVVTCDRGLPPVVFLLIRLLTHLAL |
| | LLGASQSSQALINIIKPPVRDPKGFLQQHILKDLEQLAKMLGHSADETIGVV |
| | HLVLRRLLQEQHQLSSRRLLNFDTELSTKEMRNNWEKEIAAVISPELEHLD |
| | KTLPTMNNLISQDKRISSNPVAKIIYGDPVTFLPHLPRKSVVHCSKIWSCRK |
| | RITVEYLQHIVEQKNGKERVPILWHFLQKEAELRLVKFLPEILALQRDLVK |
| | QFQNVQQVEYSSIRGFLSKHSSDGLRQLLHNRITVFLSTWNKLRRSLETNG |
| | EINLPKDYCSTDLDLDTEFEILLPRRRGLGLCATALVSYLIRLHNEIVYAVE |
| | KLSKENNSYSVDAAEVTELHVISYEVERDLTPLILSNCQYQVEEGRETVQE |
| | FDLEKIQRQIVSRFLQGKPRLSLKGIPTLVYRHDWNYEHLFMDIKNKMAQ |
| | DSLPSSVISAISGQLQSYSDACEVLSVVEVTLGFLSTAGGDPNMQLNVYTQ |
| | DILQMGDQTIHVLKALNRCQLKHTIALWQFLSAHKSEQLLRLHKEPFGEIS |
| | SRYKADLSPENAKLLSTFLNQTGLDAFLLELHEMIILKLKNPQTQTEERFRP |
| | QWSLRDTLVSYMQTKESEILPEMASQFPEEILLASCVSVWKTAAVLKWNR |
| | EMR* |
| SEQ ID | EYVNRCLFIKSSLLGSGDWHQYYDIVYMKPHGRLQKVMNHITDGPRKDL |
| NO: 2 | VKGKQIAAALMLDSTFSILQTWDTINLNSFFTQFEQFCFVLQQPMIYEGQA |
| [N-Arm | QLWTDLQYREKEVKRYLWQHLKKHVVPLPDGKSTDFLPVDCPVRSKLKT |
| domain] | GLIVLFVVEKIELLLEGSLDWLCHLLTSDASSPDEFHRDLSHILGIPQSWRL |
| | YLVNLCQRCMDTRTYTWLGALPVLHCCMELAPRHKDAWRQPEDTWAA |
| | LEGLSFSPFREQMLDTSSLLQFMREKQHLLSIDEPLFRSWFSLLPLSHLVMY |
| | MENFIEHLGRFPAHILDCLSGIYYRLPGLEQVLNTQDVQDVQNVQNILEML |
| | LRLLDTYRDKIPEEALSPSYLTVCLKLHEAICSSTKLLKFYELPALSAEIVCR |
| | MIRLLSLVDSAGQRDETGNNSVQTVFQGTLAATKRWLREVFTKNMLTSS |
| | GASFTYVKEIEVWRRLVEIQFPAEHGWKESLLGDMEWRLTKEEPLSQITA |
| | YCNSCWDTKGLEDSVAKTFEKCIIEAVSSACQSQTSILQGFSYSDLRKFGIV |
| | LSAVITKSWPRTADNFDDILKHLLTLADVKHVFRLCGTDEKILANVTEDA |
| | KRLIAVADSVLTKVVGDLLSGTILVGQLELIIKHKNQFLDIWQLREKSLSPQ |
| | DEQCAVEEALDWRREELLLLKKEKRCVDSLLKMCGNVKHLIQVDFGVLA |
| | VRHSQDLSSKRLNDTVTVRLSTSSNSQRATHYHLSSQVQEMAGKIDLLRD |
| | SHIFQLFWREAAEPLSEPKEDQEAAELLSEPEEESERHILELEEVYDYLYQP |
| | SYRKFIKLHQDLKSGEVTLAEIDVIFKDFVNKYTDLDSELKIMCTVD |
| SEQ ID | HQDQRDWIKDRVEQIKEYHHLHQAVHAAKVILQVKESLGLNGDFSVLNT |
| NO: 3 | LLNFTDNFDDFRRETLDQINQELIQAKKLLQDISEARCKGLQALSLRKEFIC |
| [Linker | WVREALGGINELKVFVDLASISAGENDIDVDRVACFHDAVQGYASLLFKL |
| domain] | DPSVDFSAFMKHLKKLWKALDKDQYLPRKLCDSARNLEWLKTVNESHGS |
| | VERSSLTLATAINQRGIYVIQAPKGGQKISPDTVLHLILPESPGSHEESREYS |
| | LEEVKELLNKLMLMSGKKDRNNTEVERFSEVFCSVQRLSQAFIDLHSAGN |
| | MLFRTWIAMAYCSPKQGVSLQMDFGLDLVTELKEGGDVTELLAALCRQ |
| | MEHFLDSWKRFVTQKRMEHFYLNFYTAEQLVYLSTELRKQPPSDAALTM |
| | LSFIKSNCTLRDVLRASVGCGSEAARYRMRRVMEELPLMLLSEFSLVDKL |
| | RIIMEQSMRCLPAFLPD |
| SEQ ID | CLDLETLGHCLAHLAGMGGSPVERCLPRGLQVGQPNLVVCGHSEVLPAA |
| NO: 4 | LAVYMQTPSQPLPTYDEVLLCTPATTFEEVALLLRRCLTLGSLGHKVYSLL |
| [AAA | FADQLSYEVARQAEELFHNLCTQQHREDYQLVMVCDGDWEHCYLPSAFS |
| ATPASE | QHKVFVTPQAPLEAIQAYLAGHYRVPKQTLSAAAVFNDRLCVGIVASERA |
| domain] | GVGKSLYVKRLHDKMKMQLNVKNVPLKTIRLIDPQVDESRVLGALLPFL |
| | DAQYQKVPVLFHLDVTSSVQTGIWVFLFKLLILQYLMDINGKMWLRNPC |
| | HLYIVEILERRTSVPSRSSSALRTRVPQFSFLDIFPKVTCRPPKEVIDMELSA |
| | LRSDTEPGMDLWEFCSETFQRPYQYLRRFNQNQDLDTFQYQEGSVEGTPE |
| | ECLQHFLFHCGVINPSWSELRNFARFLNYQLRDCEASLFCNPSFIGDTLRGF |
| | KKFVVTFMIFMARDFATPSLHTSDQSPGKHMVTMDGVREEDLAPFSLRKR |
| | WESEPHPYVFFNDDHTTMTFIGFHLQPNINGSVDAISHLTGKVIKRDVMTR |
| | DLYQGLLLQRVPFNVDFDKLPRHKKLERLCLTLGIPQATDPDKTYELTTD |
| | NMLKILAIEMRFRCGIPVIIMGETGCGKTRLIKFLSDLRRGGTNADTIKLVK |
| | VHGGTTADMIYSRVREAENVAFANKDQHQLDTILFFDEANTTEAISCIKEV |
| | LCDHMVDGQPLAEDSGLHIIAACNPYRKHSEEMICRLESAGLGYRVSMEE |
| | TADRLGSIPLRQLVYRVHALPPSLIPLVWDFGQLSDVAEKLYIQQIVQRLV |
| | ESISLDENGTRVITEVLCASQGFMRKTEDECSFVSLRDVERCVKVFRWFHE |
| | HSAMLLAQLNAFLSKSSVSKNHTERDPVLWSLMLAIGVCYHASLEKKDS |
| | YRKAIARFFPKPYDDSRLLLDEITRAQDLFLDGVPLRKTIAKNLALKENVF |
| | MMVVCIELKIPLFLVGKPGSSKSLAKTIVADAMQGPAAYSDLFRSLKQVH |
| | LVSFQCSPHSTPQGIISTFRQCARFQQGKDLQQYVSVVVLDEVGLAEDSPK |
| | MPLKTLHPLLEDGCIEDDPAPHKKVGFVGISNWALDPAKMNRGIFVSRGS |
| | PNETELIESAKGICSSDILVQDRVQGYFASFAKAYETVCKRQDKEFFGLRD |
| | YYSLIKMVFAAAKASNRKPSPQDIAQAVLRNFSGKDDIQALDIFLANLPEA |
| | KCSEEVSPMQLIKQNIFGPSQKVPGGEQEDAESRYLLVLTKNYVALQILQQ |
| | TFFEGDQQPEIIFGSGFPKDQEYTQLCRNINRVKICMETGKMVLLLNLQNL |
| | YESLYDALNQYYVHLGGQKYVDLGLGTHRVKCRVHPNFRLIVIEEKDVV |
| | YKHFPIPLINRLEKHYLDINTVLEKWQKSIVEELCAWVEKFINVKAHHFQK |
| | RHKYSPSDVFIGYHSDACASVVLQVIERQGPRALTEELHQKVSEEAKSILL |
| | NCATPDAVVRLSAYSLGGFAAEWLSQEYFHRQRHNSFADFLQAHLHTAD |
| | LERHAIFTEITTFSRLLTSHDCEILESEVTGRAPKPTLLWLQQFDTEYSFLKE |
| | VRNCLTNTAKCKILIFQTDFEDGIRSAQLIASAKYSVINEINKIRENEDRIFV |
| | YFITKLSRVGRGTAYVGFHGGLWQSVHIDDLRR |
| SEQ ID | CLDLETLGHCLAHLAGMGGSPVERCLPRGLQVGQPNLVVCGHSEVLPAA |
| NO: 5 | LAVYMQTPSQPLPTYDEVLLCTPATTFEEVALLLRRCLTLGSLGHKVYSLL |
| [AAA 1 | FADQLSYEVARQAEELFHNLCTQQHREDYQLVMVCDGDWEHCYLPSAFS |
| domain] | QHKVFVTPQAPLEAIQAYLAGHY |
| SEQ ID | RVPKQTLSAAAVFNDRLCVGIVASERAGVGKSLYVKRLHDKMKMQLNV |
| NO: 6 | KNVPLKTIRLIDPQVDESRVLGALLPFLDAQYQKVPVLFHLDVTSSVQTGI |
| [AAA 2 | WVFLFKLLILQYLMDINGKMWLRNPCHLYIVEILERRTSVPSRSSSALRTR |
| domain] | VPQFSFLDIFPKVTCRPPKEVIDMELSALRSDTEPGMDLWEFCSETFQRPY |
| | QYLRRFNQNQDLDTFQYQEGSVEGTPEECLQHFLFHCGVINPSWSELRNF |
| | ARFLNYQLRDCEASLFCNPSFIGDTLRGFKKFVVTFMIFMARDFATPSL |
| SEQ ID | TTDNMLKILAIEMRFRCGIPVIIMGETGCGKTRLIKFLSDLRRGGTNADTIK |
| NO: 7 | LVKVHGGTTADMIYSRVREAENVAFANKDQHQLDTILFFDEANTTEAISCI |
| [AAA 3 | KEVLCDHMVDGQPLAEDSGLHIIAACNPYRKHSEEMICRLESAGLGYRVS |
| domain] | MEETADRLGSIPLRQLVYRVHALPPSLIPLVWDFGQLSDVAEKLYIQQIVQ |
| | RLVESISLDENGTRVITEVLCASQGFMRKTEDECSFVSLRDVERCVKVFRW |
| | FHEHSAMLLAQLNAFLSKSSVSKNHTERDPVLWSLMLAIGVCYHASLEKK |
| | DSYRKAIARFFPKPYDDSRLLLDEITRAQDLFLDGVPLRKTIAK |
| SEQ ID | NLALKENVFMMVVCIELKIPLFLVGKPGSSKSLAKTIVADAMQGPAAYSD |
| NO: 8 | LFRSLKQVHLVSFQCSPHSTPQGIISTFRQCARFQQGKDLQQYVSVVVLDE |
| [AAA 4 | VGLAEDSPKMPLKTLHPLLEDGCIEDDPAPHKKVGFVGISNWALDPAKMN |
| domain] | RGIFVSRGSPNETELIESAKGICSSDILVQDRVQGYFASFAKAYETVCKRQD |
| | KEFFGLRDYYSLIKMVFAAAKASNRKPSPQDIAQAVLRNFSGKDDIQALDI |
| | FLANLPEAKCSEE |
| SEQ ID | VSPMQLIKQNIFGPSQKVPGGEQEDAESRYLLVLTKNYVALQILQQTFFEG |
| NO: 9 | DQQPEIIFGSGFPKDQEYTQLCRNINRVKICMETGKMVLLLNLQNLYESLY |
| [AAA 5 | DALNQYYVHLGGQKYVDLGLGTHRVKCRVHPNFRLIVIEEKDVVYKHFPI |
| domain] | PLINRLEKHYLDINTVLEKWQKSIVEELCAWVEKFINVKAHHFQKRHKYS |
| | PSDVFIGYHSDACASVVLQVIERQGPRALTEELHQKVSEEAKSILLNCATP |
| | DAVVRLSAYSLGGFAAEWLSQEYFHRQR |
| SEQ ID | HNSFADFLQAHLHTADLERHAIFTEITTFSRLLTSHDCEILESEVTGRAPKPT |
| NO: 10 | LLWLQQFDTEYSFLKEVRNCLTNTAKCKILIFQTDFEDGIRSAQLIASAKYS |
| [AAA 6 | VINEINKIRENEDRIFVYFITKLSRVGRGTAYVGFHGGLWQSVHIDDLRR |
| domain] | |
| SEQ ID | STLMVSDVTRLQHVTISQLFAPGDLPELGLEHRAEDGHEEAMETEASTSGE |
| NO: 11 | VAEVAEEAMETESSEKVGKETSELGGSDVSILDTTRLLRSCVQSAVGMLR |
| [Hinge | DQNESCTRNMRRVVLLLGLLNEDDACHASFLRVSKMRLSVFLKKQEESQ |
| domain] | FHPLEWLAREACNQDALQEAGTFRHTLWKRVQGAVTPLLASMISFI |
| SEQ ID | DRDGNLELLTRPDTPPWARDLWMFIFSDTMLLNIPLVMNNERHKGEMAYI |
| NO: 12 | VVQNHMNLSENASNNVPFSWKIKDYLEELWVQAQYITDAEGLPKKFVDIF |
| [E3 | QQTPLGRFLAQLHGEPQQELLQCYLKDFILLTMRVSTEEELKFLQMALWS |
| Ligase | CTRKLKAASEAPEEEVSLPWVHLAYQRFRSRLQNFSRILTIYPQVLHSLME |
| domain] | ARWNHELAGCEMTLDAFAAMACTEMLTRNTLKPSPQAWLQLVKNLSMP |
| | LELICSDEHMQGSGSLAQAVIREVRAQWSRIFSTALFVEHVLLGTESRVPE |
| | LQGLVTEHVFLLDKCLRENSDVKTHGPFEAVMRTLCECKETASKTLSRFGI |
| | QPCSICLGDAKDPVCLPCDHVHCLRCLRAWFASEQMICPYCLTALPDEFSP |
| | AVSQAHREAIEKHARFRQMCNSFFVDLVSTICFKDNAPPEKEVIESLLSLLF |
| | VQKGRLRDAAQRHCEHTKSLSPFNDVVDKTPVIRSVILKLLLKYSFHDVK |
| | DYIQEYLTLLKKKAFITEDKTELYMLFINCLEDSILEKTSAYSRNDELNHLE |
| | EEGRFLKAYSPASRGREPANEASVEYLQEVARIRLCLDRAADFLSEPEGGP |
| | EMAKEKQCYLQQVKQFCIRVENDWHRVYLVRKLSSQRGMEFVQGLSKP |
| | GRPHQWVFPKDVVKQQGLRQDHPGQMDRYLVYGDEYKALRDAVAKAV |
| | LECKPLGIKTALKACKTPQSQQSAYFLLTLFREVAILYRSHNASLHPTPEQC |
| | EAVSKFIGECKILSPPDISRFATSLVDNSVPLLRAGPSDSNLDGTVTEMAIH |
| | AAAVLLCGQNELLEPLKNLAFSPATMAHAFLPTMPEDLLAQARRWKGLE |
| | RVHWYTCPNGHPCSVGECGRPMEQSICIDCHAPIGGIDHKPRDGFHLVKD |
| | KADRTQTGHVLGNPQRRDVVTCDRGLPPVVFLLIRLLTHLALLLGASQSS |
| | QALINIIKPPVRDPKGFLQQHILKDLEQLAKMLGHSADETIGVVHLVLRRL |
| | LQEQHQLSSRRLLNFDTELSTKEMRNNWEKEIAAVISPELEHLDKTLPTMN |
| | NLISQDKRISSNPVAKIIYGDPVTFLPHLPRKSVVHCSKIWSCRKRITVEYL |
| | QHIVEQKNGKERVPILWHFLQKEAELRLVKFLPEILALQRDLVKQFQNVQ |
| | QVEYSSIRGFLSKHSSDGLRQLLHNRITVFLSTWNKLRRSLETNGEINLPKD |
| | YCSTDLDLDTEFEILLPRRRGLGLCATALVSYLIRLHNEIVYAVEKLSKENN |
| | SYSVDAAEVTELHVISYEVERDLTPLILSNCQYQVEEGRETVQEFDLEKIQ |
| | RQIVSRFLQGKPRLSLKGIPTLVYRHD |
| SEQ ID | DRDGNLELLTRPDTPPWARDLWMFIFSDTMLLNIPLVMNNERHKGEMAYI |
| NO: 13 | VVQNHMNLSENASNNVPFSWKIKDYLEELWVQAQYITDAEGLPKKFVDIF |
| [BACK | QQTPLGRFLAQLHGEPQQELLQCYLKDFILLTMRVSTEEELKFLQMALWS |
| domain] | CTRKLKAASEAPEEEVSLPWVHLAYQRFRSRLQNFSRILTIYPQVLHSLME |
| | ARWNHELAGCEMTLDAFAAMACTEMLTRNTLKPSPQAWLQLVKNLSMP |
| | LELICSDEHMQGSGSLAQAVIREVRAQWSRIFSTALFVEHVLLGTESRVPE |
| | LQGLVTEHVFLLDKCLRENSDVKTHGPFEAVMRTLCECKETASKTL |
| SEQ ID | SRFGIQPCSICLGDAKDPVCLPCDHVHCLRCLRAWFASEQMICPYCLTALP |
| NO: 14 | DEFSPAVSQA |
| [RING | |
| domain] | |
| SEQ ID | HREAIEKHARFRQMCNSFFVDLVSTICFKDNAPPEKEVIESLLSLLFVQKGR |
| NO: 15 | LRDAAQRHCEHTKSLSPFNDVVDKTPVIRSVILKLLLKYSFHDVKDYIQEY |
| [SHELL | LTLLKKKAFITEDKTELYMLFINCLEDSILEKTSAYSRNDELNHLEEEGRFL |
| domain] | KAYSPASRGREPANEASVEYLQEVARIRLCLDRAADFLSEPEGGPEMAKE |
| | KQCYLQQVKQFCIRVENDWHRVYLVRKLSSQRGMEFVQGLSKPGRPHQ |
| | WVFPKDVVKQQGLRQDHPGQMDRYLVYGDEYKALRDAVAKAVLECKP |
| | LGIKTALKACKTPQSQQSAYFLLTLFREVAILYRSHNASLHPTPEQCEAVS |
| | KFIGECKILSPPDISRFATSLVDNSVPLLRAGPSDSNLDGTVTEMAIHAAAV |
| | LLCGQNELLEPLKNLAFSPATMAHAFLPTMPEDLLAQARRWKGLERVHW |
| | YTCPNGHPCSVGECGRPMEQSICIDCHAPIGGIDHKPRDGFHLVKDKADRT |
| | QTGHVLGNPQRRDVVTCDRGLPPVVFLLIRLLTHLALLLGASQSSQALINII |
| | KPPVRDPKGFLQQHILKDLEQLAKMLGHSADETIGVVHLVLRRLLQEQHQ |
| | LSSRRLLNFDTELSTKEMRNNWEKEIAAVISPELEHLDKTLPTMNNLISQD |
| | KRISSNPVAKIIYGDPVTFLPHLPRKSVVHCSKIWSCRKR |
| SEQ ID | MPEDLLAQARRWKGLERVHWYTCPNGHPCSVGECGRPMEQSICIDCHAPI |
| NO: 4589 | GGIDHKPRDGFHLVKDKADRTQT |
| [RZ | |
| domain] | |
| SEQ ID | ITVEYLQHIVEQKNGKERVPILWHFLQKEAELRLVKFLPEILALQRDLVKQ |
| NO: 16 | FQNVQQVEYSSIRGFLSKHSSDGLRQLLHNRITVFLSTWNKLRRSLETNGEI |
| [CORE | NLPKDYCSTDLDLDTEFEILLPRRRGLGLCATALVSYLIRLHNEIVYAVEKL |
| domain] | SKENNSYSVDAAEVTELHVISYEVERDLTPLILSNCQYQVEEGRETVQEFD |
| | LEKIQRQIVSRFLQGKPRLSLKGIPTLVYRHD |
| SEQ ID | WNYEHLFMDIKNKMAQDSLPSSVISAISGQLQSYSDACEVLSVVEVTLGFL |
| NO: 17 | STAGGDPNMQLNVYTQDILQMGDQTIHVLKALNRCQLKHTIALWQFLSA |
| [CTD | HKSEQLLRLHKEPFGEISSRYKADLSPENAKLLSTFLNQTGLDAFLLELHE |
| domain] | MIILKLKNPQTQTEERFRPQWSLRDTLVSYMQTKESEILPEMASQFPEEILL |
| | ASCVSVWKTAAVLKWNREMR |

[0289] The present invention is not to be limited in scope by the specific embodiments described herein. Indeed, various modifications of the invention in addition to those described herein will become apparent to those skilled in the art from the foregoing description. Such modifications are intended to fall within the scope of the appended claims.

[0290] All patents, applications, publications, test methods, literature, and other materials cited herein are hereby incorporated by reference in their entirety as if physically present in this specification.

TABLE 7
RNF213 Peptides Rep 1

| | Peptide | | | | | | | | Start- | | | | |
|---|---|---|---|---|---|---|---|---|---|---|---|---|---|
| SEQ | < Protein- | Modifi- | | | | Calc. | Off- | Mass | ing | | | | |
| ID | Metrics | cation | Observed | | Observed | mass | by-x | error | posi- | | | Delta | Log |
| NO: | Confidential > | Type(s) | m/z | z | (M+H) | (M+H) | error | (ppm) | tion | Score | Delta | Mod | Prob |
| 880 | K.ASWTVQESK.K | | 518.259 | 2 | 1035.510 | 1035.511 | 0 | −0.1 | 81 | 500.2 | 500.2 | 500.2 | 7.57 |
| 884 | R.GLSQEGTGPPTSA | | 608.954 | 3 | 1824.849 | 1824.847 | 0 | 0.9 | 215 | 822.9 | 822.9 | 822.9 | 14.95 |
| | GEGHSR.T | | | | | | | | | | | | |
| 884 | R.GLSQEGTGPPTSA | | 608.954 | 3 | 1824.849 | 1824.847 | 0 | 0.9 | 215 | 818.4 | 818.4 | 818.4 | 14.95 |
| | GEGHSR.T | | | | | | | | | | | | |
| 1079 | R.GLSQEGTGPPTSA | | 1117.209 | 3 | 3349.614 | 3349.614 | 0 | −0.2 | 215 | 808.3 | 808.3 | 808.3 | 14.39 |
| | GEGHSRTEDAAQELL | | | | | | | | | | | | |
| | LPESK.G | | | | | | | | | | | | |
| 884 | R.GLSQEGTGPPTSA | | 608.955 | 3 | 1824.850 | 1824.847 | 0 | 1.4 | 215 | 688.2 | 688.2 | 688.2 | 11.96 |
| | GEGHSR.T | | | | | | | | | | | | |
| 884 | R.GLSQEGTGPPTSA | | 608.954 | 3 | 1824.847 | 1824.847 | 0 | 0.0 | 215 | 652.0 | 652.0 | 652.0 | 11.96 |
| | GEGHSR.T | | | | | | | | | | | | |
| 1079 | R.GLSQEGTGPPTSA | | 1117.209 | 3 | 3349.613 | 3349.614 | 0 | −0.3 | 215 | 626.6 | 626.6 | 626.6 | 10.39 |
| | GEGHSRTEDAAQELL | | | | | | | | | | | | |
| | LPESK.G | | | | | | | | | | | | |
| 884 | R.GLSQEGTGPPTSA | | 912.927 | 2 | 1824.847 | 1824.847 | 0 | −0.1 | 215 | 618.5 | 618.5 | 618.5 | 10.96 |
| | GEGHSR.T | | | | | | | | | | | | |
| 1079 | R.GLSQEGTGPPTSA | | 1117.210 | 3 | 3349.616 | 3349.614 | 0 | 0.5 | 215 | 606.0 | 606.0 | 606.0 | 10.39 |
| | GEGHSRTEDAAQELL | | | | | | | | | | | | |
| | LPESK.G | | | | | | | | | | | | |
| 884 | R.GLSQEGTGPPTSA | | 456.967 | 4 | 1824.847 | 1824.847 | 0 | 0.1 | 215 | 588.5 | 588.5 | 588.5 | 9.37 |
| | GEGHSR.T | | | | | | | | | | | | |
| 884 | R.GLSQEGTGPPTSA | | 608.954 | 3 | 1824.848 | 1824.847 | 0 | 0.7 | 215 | 573.3 | 573.3 | 573.3 | 9.96 |
| | GEGHSR.T | | | | | | | | | | | | |
| 842 | R.GLSQEGTGPPTSA | | 1358.849 | 5 | 6790.214 | 6790.214 | 0 | 0.0 | 215 | 570.6 | 570.6 | 570.6 | 6.65 |
| | GEGHSRTEDAAQELL | | | | | | | | | | | | |
| | LPESKGGSSEPGTEL | | | | | | | | | | | | |
| | QTTEQQAGASASMAV | | | | | | | | | | | | |
| | DAVAEPANAVK.G | | | | | | | | | | | | |
| 1079 | R.GLSQEGTGPPTSA | | 838.159 | 4 | 3349.614 | 3349.614 | 0 | 0.2 | 215 | 543.1 | 543.1 | 543.1 | 18.55 |
| | GEGHSRTEDAAQELL | | | | | | | | | | | | |
| | LPESK.G | | | | | | | | | | | | |
| 1079 | R.GLSQEGTGPPTSA | | 1117.543 | 3 | 3350.616 | 3349.614 | 1 | −0.6 | 215 | 494.1 | 494.1 | 494.1 | 7.63 |
| | GEGHSRTEDAAQELL | | | | | | | | | | | | |
| | LPESK.G | | | | | | | | | | | | |
| 884 | R.GLSQEGTGPPTSA | | 608.954 | 3 | 1824.848 | 1824.847 | 0 | 0.7 | 215 | 426.1 | 426.1 | 426.1 | 7.83 |
| | GEGHSR.T | | | | | | | | | | | | |
| 1079 | R.GLSQEGTGPPTSA | | 670.729 | 5 | 3349.616 | 3349.614 | 0 | 0.5 | 215 | 399.4 | 399.4 | 399.4 | 5.91 |
| | GEGHSRTEDAAQELL | | | | | | | | | | | | |
| | LPESK.G | | | | | | | | | | | | |
| 1079 | R.GLSQEGTGPPTSA | | 838.159 | 4 | 3349.613 | 3349.614 | 0 | −0.4 | 215 | 386.7 | 386.7 | 386.7 | 6.19 |
| | GEGHSRTEDAAQELL | | | | | | | | | | | | |
| | LPESK.G | | | | | | | | | | | | |
| 884 | R.GLSQEGTGPPTSA | | 912.927 | 2 | 1824.848 | 1824.847 | 0 | 0.3 | 215 | 386.5 | 386.5 | 386.5 | 8.45 |
| | GEGHSR.T | | | | | | | | | | | | |
| 884 | R.GLSQEGTGPPTSA | | 608.954 | 3 | 1824.849 | 1824.847 | 0 | 0.9 | 215 | 369.0 | 369.0 | 369.0 | 7.47 |
| | GEGHSR.T | | | | | | | | | | | | |
| 1185 | R.TEDAAQELLLPES | | 772.397 | 2 | 1543.786 | 1543.785 | 0 | 0.5 | 234 | 677.9 | 603.5 | 603.5 | 11.96 |
| | K.G | | | | | | | | | | | | |
| 1185 | R.TEDAAQELLLPES | | 772.396 | 2 | 1543.785 | 1543.785 | 0 | 0.1 | 234 | 621.1 | 580.2 | 580.2 | 10.96 |
| | K.G | | | | | | | | | | | | |
| 1078 | K.GGSSEPGTELQTT | | 943.953 | 4 | 3772.791 | 3772.793 | 0 | −0.4 | 248 | 967.2 | 967.2 | 967.2 | 15.65 |
| | EQQAGASASMAVDAV | | | | | | | | | | | | |
| | AEPANAVKGAGK.E | | | | | | | | | | | | |
| 1210 | K.GGSSEPGTELQTT | | 1040.999 | 4 | 4160.973 | 4160.971 | 0 | 0.5 | 248 | 933.0 | 933.0 | 933.0 | 15.65 |
| | EQQAGASASMAVDAV | | | | | | | | | | | | |
| | AEPANAVKGAGKEMK | | | | | | | | | | | | |
| | .E | | | | | | | | | | | | |
| 1078 | K.GGSSEPGTELQTT | | 1258.268 | 3 | 3772.790 | 3772.793 | 0 | 0.9 | 248 | 918.8 | 918.8 | 918.8 | 15.26 |
| | EQQAGASASMAVDAV | | | | | | | | | | | | |
| | AEPANAVKGAGK.E | | | | | | | | | | | | |
| 1078 | K.GGSSEPGTELQTT | | 1258.270 | 3 | 3772.795 | 3772.793 | 0 | 0.6 | 248 | 914.0 | 914.0 | 914.0 | 15.95 |
| | EQQAGASASMAVDAV | | | | | | | | | | | | |
| | AEPANAVKGAGK.E | | | | | | | | | | | | |
| 4620 | K.GGSSEPGTELQTT | N[+1] | 1258.930 | 3 | 3774.776 | 3773.777 | 1 | −1.2 | 248 | 826.0 | 826.0 | 183.5 | 13.26 |
| | EQQAGASASMAVDAV | | | | | | | | | | | | |
| | AEPAN[+0.984]AV | | | | | | | | | | | | |
| | KGAGK.E | | | | | | | | | | | | |
| 1210 | K.GGSSEPGTELQTT | | 1040.998 | | 4160.972 | 4160.971 | 0 | 0.1 | 248 | 825.8 | 825.8 | 825.8 | 13.66 |
| | EQQAGASASMAVDAV | | | | | | | | | | | | |
| | AEPANAVKGAGKEMK | | | | | | | | | | | | |
| | .E | | | | | | | | | | | | |
| 1567 | K.GGSSEPGTELQTT | M[+16] | 1159.208 | 3 | 3475.611 | 3475.613 | 0 | −0.6 | 248 | 750.7 | 750.7 | 750.7 | 11.86 |
| | EQQAGASASM | | | | | | | | | | | | |
| | [+15.995]AVDA | | | | | | | | | | | | |
| | VAEPANAVK.G | | | | | | | | | | | | |
| 1066 | K.GGSSEPGTELQTT | | 1154.545 | 3 | 3461.622 | 3459.618 | 2 | 0.9 | 248 | 728.4 | 536.0 | 325.1 | 10.86 |
| | EQQAGASASMAVDAV | | | | | | | | | | | | |
| | AEPANAVK.G | | | | | | | | | | | | |
| 1066 | K.GGSSEPGTELQTT | | 1153.877 | 3 | 3459.617 | 3459.618 | 0 | 0.3 | 248 | 726.1 | 726.1 | 726.1 | 11.56 |
| | EQQAGASASMAVDAV | | | | | | | | | | | | |
| | AEPANAVK.G | | | | | | | | | | | | |
| 1567 | K.GGSSEPGTELQTT | M[+16] | 1159.209 | 3 | 3475.614 | 3475.613 | 0 | 0.2 | 248 | 713.1 | 713.1 | 713.1 | 11.56 |
| | EQQAGASASM | | | | | | | | | | | | |
| | [+15.995]AVDAV | | | | | | | | | | | | |
| | AEPANA | | | | | | | | | | | | |
| | VK.G | | | | | | | | | | | | |
| 4621 | K.GGSSEPGTELQTT | M[+16] | 1044.996 | | 4176.963 | 4176.966 | 0 | −0.8 | 248 | 696.1 | 607.7 | 339.8 | 8.98 |
| | EQQAGASASMAVDAV | | | | | | | | | | | | |
| | AEPANAVKGAGKEM | | | | | | | | | | | | |
| | [+15.995]K.E | | | | | | | | | | | | |
| 1066 | K.GGSSEPGTELQTT | | 865.660 | 4 | 3459.619 | 3459.618 | 0 | 0.3 | 248 | 687.8 | 687.8 | 687.8 | 10.56 |
| | EQQAGASASMAVDAV | | | | | | | | | | | | |
| | AEPANAVK.G | | | | | | | | | | | | |
| 1066 | K.GGSSEPGTELQTT | | 1154.211 | 3 | 3460.619 | 3459.618 | 1 | −0.8 | 248 | 687.7 | 687.7 | 368.5 | 9.86 |
| | EQQAGASASMAVDAV | | | | | | | | | | | | |
| | AEPANAVK.G | | | | | | | | | | | | |
| 1066 | K.GGSSEPGTELQTT | | 865.660 | 4 | 3459.619 | 3459.618 | 0 | 0.3 | 248 | 685.4 | 685.4 | 685.4 | 10.56 |
| | EQQAGASASMAVDAV | | | | | | | | | | | | |
| | AEPANAVK.G | | | | | | | | | | | | |
| 4622 | K.GGSSEPGTELQTT | M[+16] | 1045.245 | 4 | 4177.959 | 4176.966 | 1 | 2.5 | 248 | 669.8 | 669.8 | 281.0 | 9.22 |
| | EQQAGASASM | | | | | | | | | | | | |
| | [+15.995] | | | | | | | | | | | | |
| | AVDAVAEPANA | | | | | | | | | | | | |
| | VKGAGKEMK.E | | | | | | | | | | | | |
| 1066 | K.GGSSEPGTELQTT | | 1153.878 | 3 | 3459.620 | 3459.618 | 0 | 0.6 | 248 | 663.5 | 613.2 | 613.2 | 10.56 |
| | EQQAGASASMAVDAV | | | | | | | | | | | | |
| | AEPANAVK.G | | | | | | | | | | | | |
| 1066 | K.GGSSEPGTELQTT | | 865.660 | 4 | 3459.620 | 3459.618 | 0 | 0.5 | 248 | 651.9 | 651.9 | 651.9 | 10.56 |
| | EQQAGASASMAVDAV | | | | | | | | | | | | |
| | AEPANAVK.G | | | | | | | | | | | | |
| 1066 | K.GGSSEPGTELQTT | | 1153.878 | 3 | 3459.621 | 3459.618 | 0 | 0.7 | 248 | 649.4 | 649.4 | 649.4 | 9.56 |
| | EQQAGASASMAVDAV | | | | | | | | | | | | |
| | AEPANAVK.G | | | | | | | | | | | | |
| 1066 | K.GGSSEPGTELQTT | | 1153.878 | 3 | 3459.618 | 3459.618 | 0 | 0.0 | 248 | 616.6 | 616.6 | 616.6 | 8.83 |
| | EQQAGASASMAVDAV | | | | | | | | | | | | |
| | AEPANAVK.G | | | | | | | | | | | | |
| 4621 | K.GGSSEPGTELQTT | M[+16] | 1044.996 | 4 | 4176.963 | 4176.966 | 0 | 0.7 | 248 | 615.2 | 525.6 | 409.4 | 17.75 |
| | EQQAGASASMAVDAV | | | | | | | | | | | | |
| | AEPANAVKGAGKEM | | | | | | | | | | | | |
| | [+15.995]K.E | | | | | | | | | | | | |
| 1066 | K.GGSSEPGTELQTT | | 865.660 | 4 | 3459.618 | 3459.618 | 0 | 0.0 | 248 | 598.2 | 598.2 | 598.2 | 7.83 |
| | EQQAGASASMAVDAV | | | | | | | | | | | | |
| | AEPANAVK.G | | | | | | | | | | | | |
| 1567 | K.GGSSEPGTELQTT | M[+16] | 1159.544 | 3 | 3476.616 | 3475.613 | 1 | 0.0 | 248 | 548.2 | 548.2 | 345.9 | 6.75 |
| | EQQAGASASM | | | | | | | | | | | | |
| | [+15.995] | | | | | | | | | | | | |
| | AVDAVAEPANA | | | | | | | | | | | | |
| | VK.G | | | | | | | | | | | | |
| 1066 | K.GGSSEPGTELQTT | | 1153.881 | 3 | 3459.629 | 3459.618 | 0 | 3.0 | 248 | 546.7 | 492.8 | 492.8 | 5.28 |
| | EQQAGASASMAVDAV | | | | | | | | | | | | |
| | AEPANAVK.G | | | | | | | | | | | | |
| 1078 | K.GGSSEPGTELQTT | | 944.204 | 4 | 3773.794 | 3772.793 | 1 | −0.8 | 248 | 521.3 | 293.3 | 293.3 | 4.19 |
| | EQQAGASASMAVDAV | | | | | | | | | | | | |
| | AEPANAVKGAGK.E | | | | | | | | | | | | |
| 1066 | K.GGSSEPGTELQTT | | 865.667 | 4 | 3459.646 | 3459.618 | 0 | 8.1 | 248 | 309.1 | 309.1 | 309.1 | 2.61 |
| | EQQAGASASMAVDAV | | | | | | | | | | | | |
| | AEPANAVK.G | | | | | | | | | | | | |
| 1066 | K.GGSSEPGTELQTT | | 1154.211 | 3 | 3460.619 | 3459.618 | 1 | −0.6 | 248 | 307.6 | 300.3 | 300.3 | 3.33 |
| | EQQAGASASMAVDAV | | | | | | | | | | | | |
| | AEPANAVK.G | | | | | | | | | | | | |
| 1725 | R.MKQPPATTPPFKT | C[+57] | 809.732 | 3 | 2427.180 | 2427.180 | 0 | 0.4 | 296 | 651.1 | 651.1 | 651.1 | 10.08 |
| | HC[+57.021]QEAE | | | | | | | | | | | | |
| | TK.T | | | | | | | | | | | | |
| 1725 | R.MKQPPATTPPFKT | C[+57] | 607.551 | 4 | 2427.181 | 2427.180 | 0 | 0.6 | 296 | 614.1 | 614.1 | 614.1 | 10.46 |
| | HC[+57.021]QEAE | | | | | | | | | | | | |
| | TK.T | | | | | | | | | | | | |
| 824 | R.MKQPPATTPPFK. | | 671.864 | 2 | 1342.721 | 1342.719 | 0 | 1.3 | 296 | 559.4 | 559.4 | 559.4 | 7.59 |
| | T | | | | | | | | | | | | |
| 1666 | R.M[+15.995]KQP | C[+57], | 611.549 | 4 | 2443.175 | 2443.174 | 0 | 0.0 | 296 | 538.4 | 538.4 | 538.4 | 8.62 |
| | PATTPPFKTHC | M[+16] | | | | | | | | | | | |
| | [+57.021]QEA | | | | | | | | | | | | |
| | ETK.T | | | | | | | | | | | | |
| 1725 | R.MKQPPATTPPFKT | C[+57] | 607.550 | 4 | 2427.180 | 2427.180 | 0 | 0.2 | 296 | 537.0 | 537.0 | 537.0 | 8.62 |
| | HC[+57.021]QEAE | | | | | | | | | | | | |
| | TK.T | | | | | | | | | | | | |
| 1725 | R.MKQPPATTPPFKT | C[+57] | 486.242 | 5 | 2427.181 | 2427.180 | 0 | 0.5 | 296 | 530.7 | 530.7 | 530.7 | 8.62 |
| | HC[+57.021]QEAE | | | | | | | | | | | | |
| | TK.T | | | | | | | | | | | | |
| 1725 | R.MKQPPATTPPFKT | C[+57] | 486.242 | 5 | 2427.183 | 2427.180 | 0 | 1.5 | 296 | 513.6 | 513.6 | 513.6 | 7.68 |
| | HC[+57.021]QEAE | | | | | | | | | | | | |
| | TK.T | | | | | | | | | | | | |
| 1725 | R.MKQPPATTPPFKT | C[+57] | 486.242 | 5 | 2427.181 | 2427.180 | 0 | 0.7 | 296 | 511.5 | 511.5 | 511.5 | 8.41 |
| | HC[+57.021]QEAE | | | | | | | | | | | | |
| | TK.T | | | | | | | | | | | | |
| 1725 | R.MKQPPATTPPFKT | C[+57] | 486.243 | 5 | 2427.185 | 2427.180 | 0 | 2.0 | 296 | 508.3 | 508.3 | 508.3 | 8.41 |
| | HC[+57.021]QEAE | | | | | | | | | | | | |
| | TK.T | | | | | | | | | | | | |
| 1666 | R.M[+15.995]KQP | C[+57], | 489.441 | 5 | 2443.174 | 2443.174 | 0 | −0.1 | 296 | 462.5 | 462.5 | 462.5 | 8.17 |
| | PATTPPFKTHC | M[+16] | | | | | | | | | | | |
| | [+57.021] | | | | | | | | | | | | |
| | QEAETK.T | | | | | | | | | | | | |
| 824 | R.MKQPPATTPPFK. | | 448.245 | 3 | 1342.719 | 1342.719 | 0 | 0.1 | 296 | 446.4 | 446.4 | 446.4 | 8.11 |
| | T | | | | | | | | | | | | |
| 824 | R.MKQPPATTPPFK. | | 448.244 | 3 | 1342.718 | 1342.719 | 1 | −0.3 | 296 | 407.7 | 407.7 | 407.7 | 7.03 |
| | T | | | | | | | | | | | | |
| 1666 | R.M[+15.995]KQP | C[+57], | 611.549 | 4 | 2443.175 | 2443.174 | 0 | 0.3 | 296 | 404.1 | 404.1 | 404.1 | 7.33 |
| | PATTPPFKTHC | M[+16] | | | | | | | | | | | |
| | [+57.021] | | | | | | | | | | | | |
| | QEAETK.T | | | | | | | | | | | | |
| 1539 | R.M[+15.995]KQP | M[+16] | 453.576 | 3 | 1358.713 | 1358.714 | 0 | −0.3 | 296 | 400.4 | 276.2 | 276.2 | 5.27 |
| | PATTPPFK.T | | | | | | | | | | | | |
| 1666 | R.M[+15.995]KQP | C[+57], | 489.440 | 5 | 2443.173 | 2443.174 | 0 | 0.7 | 296 | 388.1 | 388.1 | 388.1 | 7.24 |
| | PATTPPFKTHC | M[+16] | | | | | | | | | | | |
| | [+57.021] | | | | | | | | | | | | |
| | QEAETK.T | | | | | | | | | | | | |
| 824 | R.MKQPPATTPPFK. | | 448.245 | 3 | 1342.719 | 1342.719 | 0 | 0.5 | 296 | 369.4 | 369.4 | 369.4 | 6.68 |
| | T | | | | | | | | | | | | |
| 824 | R.MKQPPATTPPFK. | | 672.365 | 2 | 1343.723 | 1342.719 | 1 | 0.7 | 296 | 359.7 | 359.7 | 359.7 | 3.41 |
| | T | | | | | | | | | | | | |
| 1539 | R.M[+15.995]KQP | M[+16] | 453.576 | 3 | 1358.714 | 1358.714 | 0 | 0.5 | 296 | 355.8 | 229.6 | 229.6 | 5.16 |
| | PATTPPFK.T | | | | | | | | | | | | |
| 1666 | R.M[+15.995]KQP | C[+57], | 611.549 | 4 | 2443.175 | 2443.174 | 0 | 0.1 | 296 | 337.7 | 337.7 | 337.7 | 5.35 |
| | PATTPPFKTHC | M[+16] | | | | | | | | | | | |
| | [+57.021]QEAET | | | | | | | | | | | | |
| | K.T | | | | | | | | | | | | |
| 1539 | R.M[+15.995]KQP | M[+16] | 679.860 | 2 | 1358.713 | 1358.714 | 0 | 0.5 | 296 | 332.0 | 308.1 | 308.1 | 4.28 |
| | PATTPPFK.T | | | | | | | | | | | | |
| 1539 | R.M[+15.995]KQP | M[+16] | 453.576 | 3 | 1358.714 | 1358.714 | 0 | 0.5 | 296 | 313.8 | 144.3 | 144.3 | 4.41 |
| | PATTPPFK.T | | | | | | | | | | | | |
| 1687 | K.QPPATTPPFKTHC | C[+57] | 542.767 | 4 | 2168.045 | 2168.044 | 0 | 0.3 | 298 | 507.9 | 507.9 | 507.9 | 8.72 |
| | [+57.021]QEAETK | | | | | | | | | | | | |
| | .T | | | | | | | | | | | | |
| 1687 | K.QPPATTPPFKTHC | C[+57] | 542.766 | 4 | 2168.044 | 2168.044 | 0 | −0.2 | 298 | 441.2 | 441.2 | 441.2 | 7.75 |
| | [+57.021]QEAETK | | | | | | | | | | | | |
| | .T | | | | | | | | | | | | |
| 1687 | K.QPPATTPPFKTHC | C[+57] | 542.767 | 4 | 2168.044 | 2168.044 | 0 | 0.0 | 298 | 412.7 | 412.7 | 412.7 | 7.64 |
| | [+57.021]QEAETK | | | | | | | | | | | | |
| | .T | | | | | | | | | | | | |
| 1690 | K.THC[+57.021]Q | C[+57] | 769.679 | 3 | 2307.024 | 2307.023 | 0 | 0.3 | 308 | 643.7 | 643.7 | 643.7 | 9.08 |
| | EAETKTKDEMAAAEE | | | | | | | | | | | | |
| | K.V | | | | | | | | | | | | |
| 1690 | K.THC[+57.021]Q | C[+57] | 577.511 | 4 | 2307.022 | 2307.023 | 0 | −0.5 | 308 | 570.8 | 570.8 | 570.8 | 8.75 |
| | EAETKTKDEMAAAEE | | | | | | | | | | | | |
| | K.V | | | | | | | | | | | | |
| 1667 | K.THC[+57.021]Q | C[+57], | 581.510 | 4 | 2323.019 | 2323.018 | 0 | 0.4 | 308 | 320.3 | 320.3 | 320.3 | 5.35 |
| | EAETKTKDEM | M[+16] | | | | | | | | | | | |
| | [+15.995] | | | | | | | | | | | | |
| | AAAEEK.V | | | | | | | | | | | | |
| 1357 | K.TKDEMAAAEEKVG | | 502.921 | 3 | 1506.747 | 1506.747 | 0 | 0.0 | 317 | 716.5 | 628.2 | 628.2 | 12.46 |
| | K.N | | | | | | | | | | | | |
| 2203 | K.NQEADVQEVK.A | | 580.283 | 2 | 1159.559 | 1159.559 | 0 | 0.1 | 360 | 409.2 | 385.5 | 385.5 | 6.99 |
| 994 | K.SSLLGSGDWHQYY | | 903.768 | 3 | 2709.289 | 2709.288 | 0 | 0.6 | 484 | 708.6 | 708.6 | 708.6 | 11.58 |
| | DIVYMKPHGR.L | | | | | | | | | | | | |
| 994 | K.SSLLGSGDWHQYY | | 542.663 | 5 | 2709.288 | 2709.288 | 0 | 0.0 | 484 | 608.6 | 608.6 | 608.6 | 10.96 |
| | DIVYMKPHGR.L | | | | | | | | | | | | |
| 994 | K.SSLLGSGDWHQYY | | 542.664 | 5 | 2709.289 | 2709.288 | 0 | 0.3 | 484 | 542.1 | 542.1 | 542.1 | 9.12 |
| | DIVYMKPHGR.L | | | | | | | | | | | | |
| 1590 | K.SSLLGSGDWHQYY | M[+16] | 545.863 | 5 | 2725.284 | 2725.283 | 0 | 0.4 | 484 | 506.5 | 506.5 | 506.5 | 8.18 |
| | DIVYM[+15.995]K | | | | | | | | | | | | |
| | PHGR.L | | | | | | | | | | | | |
| 1590 | K.SSLLGSGDWHQYY | M[+16] | 545.863 | 5 | 2725.284 | 2725.283 | 0 | 0.4 | 484 | 478.2 | 478.2 | 478.2 | 7.94 |
| | DIVYM[+15.995]K | | | | | | | | | | | | |
| | PHGR.L | | | | | | | | | | | | |
| 994 | K.SSLLGSGDWHQYY | | 542.664 | 5 | 2709.289 | 2709.288 | 0 | 0.3 | 484 | 394.0 | 394.0 | 394.0 | 7.24 |
| | DIVYMKPHGR.L | | | | | | | | | | | | |
| 3593 | R.LQKVMNHITDGPR | | 503.605 | 3 | 1508.800 | 1508.800 | 0 | −0.2 | 507 | 453.3 | 391.2 | 391.2 | 7.13 |
| | .K | | | | | | | | | | | | |
| 2034 | R.LQKVMNHITDGPR | | 409.980 | 4 | 1636.898 | 1636.895 | 0 | 1.7 | 507 | 373.2 | 373.2 | 373.2 | 6.97 |
| | K.D | | | | | | | | | | | | |
| 860 | K.VMNHITDGPRKDL | | 574.982 | 3 | 1722.932 | 1722.932 | 0 | −0.1 | 510 | 482.2 | 482.2 | 482.2 | 6.06 |
| | VK.G | | | | | | | | | | | | |
| 860 | K.VMNHITDGPRKDL | | 431.489 | 4 | 1722.935 | 1722.932 | 0 | 2.0 | 510 | 450.9 | 450.9 | 450.9 | 7.44 |
| | VK.G | | | | | | | | | | | | |
| 860 | K.VMNHITDGPRKDL | | 431.489 | 4 | 1722.933 | 1722.932 | 0 | 0.3 | 510 | 442.9 | 442.9 | 442.9 | 7.44 |
| | VK.G | | | | | | | | | | | | |
| 860 | K.VMNHITDGPRKDL | | 574.982 | 3 | 1722.932 | 1722.932 | 0 | 0.0 | 510 | 431.6 | 431.6 | 431.6 | 5.71 |
| | VK.G | | | | | | | | | | | | |
| 860 | K.VMNHITDGPRKDL | | 431.489 | 4 | 1722.934 | 1722.932 | 0 | 1.0 | 510 | 419.4 | 419.4 | 419.4 | 7.09 |
| | VK.G | | | | | | | | | | | | |
| 1526 | K.VM[+15.995]NH | M[+16] | 580.314 | 3 | 1738.928 | 1738.927 | 0 | 0.6 | 510 | 379.7 | 379.7 | 379.7 | 5.36 |
| | ITDGPRKDLVK.G | | | | | | | | | | | | |
| 860 | K.VMNHITDGPRKDL | | 431.489 | 4 | 1722.932 | 1722.932 | 0 | 0.1 | 510 | 368.3 | 368.3 | 368.3 | 6.97 |
| | VK.G | | | | | | | | | | | | |
| 1526 | K.VM[+15.995]NH | M[+16] | 435.487 | 4 | 1738.928 | 1738.927 | 0 | 0.5 | 510 | 362.9 | 362.9 | 362.9 | 6.97 |
| | ITDGPRKDLVK.G | | | | | | | | | | | | |
| 860 | K.VMNHITDGPRKDL | | 431.489 | 4 | 1722.933 | 1722.932 | 0 | 0.5 | 510 | 341.0 | 341.0 | 341.0 | 5.58 |
| | VK.G | | | | | | | | | | | | |
| 860 | K.VMNHITDGPRKDL | | 431.489 | 4 | 1722.933 | 1722.932 | 0 | 0.5 | 510 | 329.2 | 329.2 | 329.2 | 5.35 |
| | VK.G | | | | | | | | | | | | |
| 1526 | K.VM[+15.995]NH | M[+16] | 435.487 | 4 | 1738.927 | 1738.927 | 0 | 0.0 | 510 | 310.9 | 310.9 | 310.9 | 5.11 |
| | ITDGPRKDLVK.G | | | | | | | | | | | | |
| 1834 | K.RYLWQHLKK.H | | 424.584 | 3 | 1271.738 | 1271.737 | 0 | 0.5 | 588 | 432.2 | 432.2 | 432.2 | 5.65 |
| 907 | R.YLWQHLKK.H | | 558.322 | 2 | 1115.636 | 1115.636 | 0 | −0.2 | 589 | 506.1 | 506.1 | 506.1 | 5.77 |
| 2363 | R.YLWQHLK.K | | 494.274 | 2 | 987.541 | 987.541 | 0 | 0.1 | 589 | 463.5 | 463.5 | 463.5 | 6.94 |
| 907 | R.YLWQHLKK.H | | 558.322 | 2 | 1115.636 | 1115.636 | 0 | 0.1 | 589 | 427.1 | 427.1 | 427.1 | 15.42 |
| 907 | R.YLWQHLKK.H | | 558.322 | 2 | 1115.636 | 1115.636 | 0 | 0.3 | 589 | 348.7 | 348.7 | 348.7 | 13.05 |
| 956 | K.HVVPLPDGK.S | | 481.277 | 2 | 961.546 | 961.547 | 0 | 0.2 | 597 | 535.6 | 358.9 | 358.9 | 6.74 |
| 956 | K.HVVPLPDGK.S | | 481.277 | 2 | 961.546 | 961.547 | 0 | 0.2 | 597 | 449.6 | 351.9 | 351.9 | 6.04 |
| 4624 | K.HVVPLPDGKSTDF | C[+57] | 587.807 | 4 | 2348.207 | 2348.207 | 0 | 0.1 | 597 | 337.8 | 337.8 | 337.8 | 5.66 |
| | LPVDC[+57.021]P | | | | | | | | | | | | |
| | VR.S | | | | | | | | | | | | |
| 4624 | K.HVVPLPDGKSTDF | C[+57] | 587.807 | 4 | 2348.208 | 2348.207 | 0 | 0.4 | 597 | 328.8 | 328.8 | 328.8 | 5.51 |
| | LPVDC[+57.021]P | | | | | | | | | | | | |
| | VR.S | | | | | | | | | | | | |
| 1704 | K.STDFLPVDC | C[+57] | 703.343 | 2 | 1405.678 | 1405.678 | 0 | 0.3 | 606 | 588.8 | 557.3 | 557.3 | 9.59 |
| | [+57.021]PVR.S | | | | | | | | | | | | |
| 1704 | K.STDFLPVDC | C[+57] | 469.231 | 3 | 1405.677 | 1405.678 | 0 | −0.5 | 606 | 467.8 | 467.8 | 467.8 | 5.79 |
| | [+57.021] | | | | | | | | | | | | |
| | PVR.S | | | | | | | | | | | | |
| 812 | R.DLSHILGIPQSW | | 507.944 | 3 | 1521.817 | 1521.817 | 0 | 0.3 | 661 | 451.2 | 451.2 | 451.2 | 6.62 |
| | R.L | | | | | | | | | | | | |
| 1133 | R.QPEDTWAALEGLS | | 933.453 | 4 | 3730.792 | 3730.788 | 0 | 1.0 | 714 | 777.8 | 777.8 | 777.8 | 12.79 |
| | FSPFREQMLDTSSLL | | | | | | | | | | | | |
| | QFMR.E | | | | | | | | | | | | |
| 1616 | R.QPEDTWAALEGLS | M[+16] | 1249.602 | 3 | 3746.790 | 3746.783 | 0 | 2.0 | 714 | 732.3 | 676.3 | 91.3 | 12.39 |
| | FSPFREQM | | | | | | | | | | | | |
| | [+15.995]LDTSS | | | | | | | | | | | | |
| | LLQFMR.E | | | | | | | | | | | | |
| 1133 | R.QPEDTWAALEGLS | | 1244.271 | 3 | 3730.797 | 3730.788 | 0 | 2.5 | 714 | 508.9 | 508.9 | 508.9 | 18.34 |
| | FSPFREQMLDTSSLL | | | | | | | | | | | | |
| | QFMR.E | | | | | | | | | | | | |
| 885 | R.QPEDTWAALEGLS | | 684.334 | 3 | 2050.988 | 2050.987 | 0 | 0.5 | 714 | 491.8 | 491.8 | 491.8 | 18.32 |
| | FSPFR.E | | | | | | | | | | | | |
| 949 | R.EQMLDTSSLLQFM | | 849.913 | 2 | 1698.819 | 1698.819 | 0 | 0.1 | 732 | 595.8 | 595.8 | 595.8 | 9.96 |
| | R.E | | | | | | | | | | | | |
| 949 | R.EQMLDTSSLLQFM | | 566.945 | 3 | 1698.819 | 1698.819 | 0 | 0.2 | 732 | 523.5 | 523.5 | 523.5 | 18.53 |
| | R.E | | | | | | | | | | | | |
| 1558 | R.EQM[+15.995]L | M[+16] | 572.276 | 3 | 1714.814 | 1714.814 | 0 | 0.1 | 732 | 507.7 | 507.7 | 507.7 | 7.59 |
| | DTSSLLQFMR.E | | | | | | | | | | | | |
| 1860 | R.EKQHLLSIDEPLF | | 575.649 | 3 | 1724.933 | 1724.933 | 0 | 0.0 | 746 | 409.3 | 409.3 | 409.3 | 7.64 |
| | R.S | | | | | | | | | | | | |
| 1860 | R.EKQHLLSIDEPLF | | 431.989 | 4 | 1724.933 | 1724.933 | 0 | 0.0 | 746 | 371.4 | 371.4 | 371.4 | 7.28 |
| | R.S | | | | | | | | | | | | |
| 2190 | K.QHLLSIDEPLFR. | | 489.937 | 3 | 1467.796 | 1467.795 | 0 | 0.0 | 748 | 437.6 | 437.6 | 437.6 | 7.22 |
| | S | | | | | | | | | | | | |
| 1074 | R.LLSLVDSAGQR.D | | 579.828 | 2 | 1158.648 | 1158.648 | 0 | −0.1 | 881 | 568.8 | 497.1 | 497.1 | 9.59 |
| 1226 | R.DETGNNSVQTVFQ | | 746.377 | 3 | 2237.116 | 2237.116 | 0 | 0.2 | 892 | 601.6 | 601.6 | 601.6 | 10.77 |
| | GTLAATKR.W | | | | | | | | | | | | |
| 867 | R.LVEIQFPAEHGWK | | 693.347 | 4 | 2770.366 | 2770.366 | 0 | 0.2 | 942 | 552.4 | 552.4 | 552.4 | 8.93 |
| | ESLLGDMEWR.L | | | | | | | | | | | | |
| 867 | R.LVEIQFPAEHGWK | | 693.347 | 4 | 2770.365 | 2770.366 | 0 | −0.3 | 942 | 482.8 | 482.8 | 482.8 | 8.72 |
| | ESLLGDMEWR.L | | | | | | | | | | | | |
| 4202 | K.ESLLGDMEWR.L | | 618.290 | 2 | 1235.573 | 1235.573 | 0 | 0.3 | 955 | 341.0 | 341.0 | 341.0 | 5.48 |
| 996 | K.GLEDSVAKTFEK. | | 662.344 | 2 | 1323.680 | 1323.679 | 0 | 0.6 | 986 | 530.3 | 327.7 | 327.7 | 6.55 |
| | C | | | | | | | | | | | | |
| 996 | K.GLEDSVAKTFEK. | | 441.898 | 3 | 1323.679 | 1323.679 | 0 | −0.1 | 986 | 410.0 | 309.1 | 309.1 | 5.59 |
| | C | | | | | | | | | | | | |
| 972 | K.FGIVLSAVITK.S | | 574.358 | 2 | 1147.709 | 1147.709 | 0 | 0.2 | 1025 | 533.4 | 533.4 | 533.4 | 8.02 |
| 913 | R.TADNFDDILKHLL | | 714.720 | 3 | 2142.146 | 2142.144 | 0 | 0.9 | 1040 | 659.2 | 659.2 | 659.2 | 11.77 |
| | TLADVK.H | | | | | | | | | | | | |
| 913 | R.TADNFDDILKHLL | | 536.292 | 4 | 2142.146 | 2142.144 | 0 | 0.6 | 1040 | 575.3 | 575.3 | 575.3 | 9.77 |
| | TLADVK.H | | | | | | | | | | | | |
| 913 | R.TADNFDDILKHLL | | 536.292 | 4 | 2142.146 | 2142.144 | 0 | 0.8 | 1040 | 574.9 | 574.9 | 574.9 | 9.77 |
| | TLADVK.H | | | | | | | | | | | | |
| 913 | R.TADNFDDILKHLL | | 536.292 | 4 | 2142.145 | 2142.144 | 0 | 0.5 | 1040 | 545.3 | 545.3 | 545.3 | 8.93 |
| | TLADVK.H | | | | | | | | | | | | |
| 817 | R.TADNFDDILK.H | | 576.283 | 2 | 1151.558 | 1151.558 | 0 | 0.1 | 1040 | 490.9 | 490.9 | 490.9 | 7.57 |
| 913 | R.TADNFDDILKHLL | | 714.721 | 3 | 2142.147 | 2142.144 | 0 | 1.3 | 1040 | 419.6 | 1419.6 | 419.6 | 7.40 |
| | TLADVK.H | | | | | | | | | | | | |
| 1060 | K.HLLTLADVK.H | | 505.306 | 2 | 1009.604 | 1009.604 | 0 | −0.1 | 1050 | 581.0 | 581.0 | 581.0 | 18.86 |
| 1724 | R.LC[+57.021]GT | C[+57] | 509.014 | 4 | 2033.034 | 2033.033 | 0 | 0.2 | 1063 | 643.8 | 625.8 | 625.8 | 10.46 |
| | DEKILANVTEDAKR. | | | | | | | | | | | | |
| | L | | | | | | | | | | | | |
| 1724 | R.LC[+57.021]GT | C[+57] | 509.014 | 4 | 2033.034 | 2033.033 | 0 | 0.3 | 1063 | 427.4 | 427.4 | 427.4 | 7.09 |
| | DEKILANVTEDAKR. | | | | | | | | | | | | |
| | L | | | | | | | | | | | | |
| 1724 | R.LC[+57.021]GT | C[+57] | 509.014 | 4 | 2033.034 | 2033.033 | 0 | 0.5 | 1063 | 311.2 | 311.2 | 311.2 | 5.27 |
| | DEKILANVTEDAKR. | | | | | | | | | | | | |
| | L | | | | | | | | | | | | |
| 951 | K.ILANVTEDAKR.L | | 615.346 | 2 | 1229.684 | 1229.685 | 0 | 0.7 | 1070 | 559.2 | 559.2 | 559.2 | 7.13 |
| 951 | K.ILANVTEDAKR.L | | 410.567 | 3 | 1229.685 | 1229.685 | 0 | 0.1 | 1070 | 530.2 | 1530.2 | 530.2 | 18.56 |
| 829 | K.ILANVTEDAK.R | | 537.295 | 2 | 1073.583 | 1073.584 | 0 | 0.4 | 1070 | 478.3 | 301.6 | 301.6 | 5.19 |
| 951 | K.ILANVTEDAKR.L | | 410.567 | 3 | 1229.685 | 1229.685 | 0 | 0.0 | 1070 | 464.0 | 464.0 | 464.0 | 7.38 |
| 951 | K.ILANVTEDAKR.L | | 410.566 | 3 | 1229.685 | 1229.685 | 0 | 0.2 | 1070 | 362.5 | 289.6 | 289.6 | 15.25 |
| 951 | K.ILANVTEDAKR.L | | 615.346 | 2 | 1229.685 | 1229.685 | 0 | 0.1 | 1070 | 340.7 | 340.7 | 340.7 | 5.52 |
| 1772 | K.RLIAVADSVLTK. | | 643.396 | 2 | 1285.784 | 1285.784 | 0 | 0.4 | 1080 | 411.9 | 411.9 | 411.9 | 6.83 |
| | V | | | | | | | | | | | | |
| 2210 | R.LIAVADSVLTK.V | | 565.345 | 2 | 1129.683 | 1129.683 | 0 | 0.1 | 1081 | 461.3 | 461.3 | 461.3 | 7.10 |
| 1220 | K.VVGDLLSGTILVG | | 1040.636 | 2 | 2080.264 | 2080.263 | 0 | 0.5 | 1092 | 634.4 | 634.4 | 634.4 | 10.96 |
| | QLELIIK.H | | | | | | | | | | | | |
| 1220 | K.VVGDLLSGTILVG | | 694.093 | 3 | 2080.265 | 2080.263 | 0 | 0.9 | 1092 | 613.1 | 613.1 | 613.1 | 10.37 |
| | QLELIIK.H | | | | | | | | | | | | |
| 2369 | K.NQFLDIWQLREK. | | 530.620 | 3 | 1589.844 | 1589.844 | 0 | 0.3 | 1114 | 451.7 | 451.7 | 451.7 | 7.38 |
| | S | | | | | | | | | | | | |
| 2135 | K.NQFLDIWQLR.E | | 444.907 | 3 | 1332.707 | 1332.706 | 0 | 0.4 | 1114 | 435.0 | 435.0 | 435.0 | 6.62 |
| 2135 | K.NQFLDIWQLR.E | | 666.857 | 2 | 1332.707 | 1332.706 | 0 | 0.7 | 1114 | 361.9 | 361.9 | 361.9 | 6.72 |
| 1729 | K.SLSPQDEQC | C[+57] | 1066.982 | 2 | 2132.957 | 2132.955 | 0 | 0.6 | 1126 | 513.4 | 513.4 | 513.4 | 8.91 |
| | [+57.021]AVEEAL | | | | | | | | | | | | |
| | DWR.R | | | | | | | | | | | | |
| 4626 | K.SLSPQDEQC | C[+57] | 763.691 | 3 | 2289.058 | 2289.056 | 0 | 0.7 | 1126 | 382.1 | 382.1 | 382.1 | 7.05 |
| | [+57.021]AVEEAL | | | | | | | | | | | | |
| | DWRR.E | | | | | | | | | | | | |
| 1763 | R.REELLLLK.K | | 507.321 | 2 | 1013.635 | 1013.635 | 0 | −0.4 | 1144 | 375.7 | 375.7 | 375.7 | 5.83 |
| 989 | R.EELLLLKK.E | | 493.318 | 2 | 985.629 | 985.629 | 0 | 0.1 | 1145 | 550.1 | 550.1 | 550.1 | 7.83 |
| 989 | R.EELLLLKK.E | | 493.318 | 2 | 985.629 | 985.629 | 0 | 0.0 | 1145 | 540.7 | 540.7 | 540.7 | 8.56 |
| 2221 | R.EELLLLK.K | | 429.271 | 2 | 857.535 | 857.534 | 0 | 0.4 | 1145 | 465.3 | 465.3 | 465.3 | 7.33 |
| 989 | R.EELLLLKK.E | | 493.318 | 2 | 985.629 | 985.629 | 0 | −0.3 | 1145 | 383.7 | 383.7 | 383.7 | 6.52 |
| 1703 | R.C[+57.021]VDS | C[+57] | 417.723 | 2 | 834.439 | 834.439 | 0 | 0.3 | 1156 | 506.0 | 506.0 | 506.0 | 7.18 |
| | LLK.M | | | | | | | | | | | | |
| 1703 | R.C[+57.021]VDS | C[+57] | 417.723 | 2 | 834.439 | 834.439 | 0 | 0.0 | 1156 | 463.6 | 463.6 | 463.6 | 6.94 |
| | LLK.M | | | | | | | | | | | | |
| 1703 | R.C[+57.021]VDS | C[+57] | 417.723 | 2 | 834.439 | 834.439 | 0 | 0.2 | 1156 | 350.1 | 182.9 | 182.9 | 4.86 |
| | LLK.M | | | | | | | | | | | | |
| 926 | K.HLIQVDFGVLAVR | | 733.928 | 2 | 1466.848 | 1466.848 | 0 | −0.1 | 1169 | 561.9 | 561.9 | 561.9 | 9.59 |
| | .H | | | | | | | | | | | | |
| 926 | K.HLIQVDFGVLAVR | | 489.621 | 3 | 1466.847 | 1466.848 | 0 | −0.6 | 1169 | 518.8 | 518.8 | 518.8 | 7.83 |
| | .H | | | | | | | | | | | | |
| 926 | K.HLIQVDFGVLAVR | | 489.620 | 3 | 1466.846 | 1466.848 | 0 | 1.1 | 1169 | 421.0 | 421.0 | 421.0 | 6.75 |
| | .H | | | | | | | | | | | | |
| 1160 | R.HSQDLSSKRLNDT | | 489.762 | 4 | 1956.026 | 1956.026 | 0 | −0.1 | 1182 | 614.1 | 614.1 | 614.1 | 10.46 |
| | VTVR.L | | | | | | | | | | | | |
| 2114 | R.LNDTVTVR.L | | 459.256 | 2 | 917.505 | 917.505 | 0 | 0.2 | 1191 | 384.0 | 384.0 | 384.0 | 6.54 |
| 4627 | R.LSTSSNSQR.A | | 490.244 | 2 | 979.481 | 979.480 | 0 | 0.2 | 1199 | 380.0 | 380.0 | 380.0 | 6.72 |
| 4627 | R.LSTSSNSQR.A | | 490.244 | 2 | 979.480 | 979.480 | 0 | 0.0 | 1199 | 346.8 | 346.8 | 346.8 | 5.33 |
| 1917 | R.LSTSSNSQRATHY | | 687.585 | 4 | 2747.317 | 2747.317 | 0 | 0.0 | 1199 | 303.7 | 303.7 | 303.7 | 5.20 |
| | HLSSQVQEMAGK.I | | | | | | | | | | | | |
| 811 | R.ATHYHLSSQVQEM | | 600.064 | 4 | 2397.234 | 2397.234 | 0 | 0.0 | 1208 | 696.6 | 696.6 | 696.6 | 11.77 |
| | AGKIDLLR.D | | | | | | | | | | | | |
| 1012 | R.ATHYHLSSQVQEM | | 893.930 | 2 | 1786.853 | 1786.854 | 0 | −0.6 | 1208 | 696.2 | 696.2 | 696.2 | 9.88 |
| | AGK.I | | | | | | | | | | | | |
| 1012 | R.ATHYHLSSQVQEM | | 596.290 | 3 | 1786.854 | 1786.854 | 0 | −0.1 | 1208 | 674.9 | 674.9 | 674.9 | 11.96 |
| | AGK.I | | | | | | | | | | | | |
| 1012 | R.ATHYHLSSQVQEM | | 596.289 | 3 | 1786.854 | 1786.854 | 0 | 0.2 | 1208 | 634.9 | 634.9 | 634.9 | 10.96 |
| | AGK.I | | | | | | | | | | | | |
| 1012 | R.ATHYHLSSQVQEM | | 596.290 | 3 | 1786.855 | 1786.854 | 0 | 0.2 | 1208 | 587.1 | 587.1 | 587.1 | 9.96 |
| | AGK.I | | | | | | | | | | | | |
| 1562 | R.ATHYHLSSQVQEM | M[+16] | 601.621 | 3 | 1802.849 | 1802.849 | 0 | −0.2 | 1208 | 583.8 | 583.8 | 583.8 | 9.96 |
| | [+15.995]AGK.I | | | | | | | | | | | | |
| 1562 | R.ATHYHLSSQVQEM | M[+16] | 601.621 | 3 | 1802.849 | 1802.849 | 0 | 0.0 | 1208 | 564.9 | 564.9 | 564.9 | 9.96 |
| | [+15.995]AGK.I | | | | | | | | | | | | |
| 1012 | R.ATHYHLSSQVQEM | | 596.289 | 3 | 1786.853 | 1786.854 | 0 | −0.5 | 1208 | 529.4 | 529.4 | 529.4 | 7.69 |
| | AGK.I | | | | | | | | | | | | |
| 1562 | R.ATHYHLSSQVQEM | M[+16] | 601.621 | 3 | 1802.850 | 1802.849 | 0 | 0.4 | 1208 | 467.1 | 467.1 | 467.1 | 7.70 |
| | [+15.995]AGK.I | | | | | | | | | | | | |
| 811 | R.ATHYHLSSQVQEM | | 480.253 | 5 | 2397.234 | 2397.234 | 0 | −0.2 | 1208 | 462.2 | 462.2 | 462.2 | 8.48 |
| | AGKIDLLR.D | | | | | | | | | | | | |
| 811 | R.ATHYHLSSQVQEM | | 480.253 | 5 | 2397.234 | 2397.234 | 0 | 0.2 | 1208 | 452.2 | 452.2 | 452.2 | 7.75 |
| | AGKIDLLR.D | | | | | | | | | | | | |
| 1012 | R.ATHYHLSSQVQEM | | 447.470 | 4 | 1786.857 | 1786.854 | 0 | 1.6 | 1208 | 441.6 | 441.6 | 441.6 | 7.94 |
| | AGK.I | | | | | | | | | | | | |
| 1012 | R.ATHYHLSSQVQEM | | 447.469 | 4 | 1786.856 | 1786.854 | 0 | 1.0 | 1208 | 430.7 | 430.7 | 430.7 | 8.56 |
| | AGK.I | | | | | | | | | | | | |
| 1012 | R.ATHYHLSSQVQEM | | 447.469 | 4 | 1786.854 | 1786.854 | 0 | 0.0 | 1208 | 395.6 | 395.6 | 395.6 | 7.47 |
| | AGK.I | | | | | | | | | | | | |
| 1012 | R.ATHYHLSSQVQEM | | 447.469 | 4 | 1786.854 | 1786.854 | 0 | −0.2 | 1208 | 376.8 | 376.8 | 376.8 | 7.24 |
| | AGK.I | | | | | | | | | | | | |
| 1562 | R.ATHYHLSSQVQEM | M[+16] | 451.468 | 4 | 1802.848 | 1802.849 | 0 | −0.3 | 1208 | 374.7 | 374.7 | 374.7 | 6.77 |
| | [+15.995]AGK.I | | | | | | | | | | | | |
| 1012 | R.ATHYHLSSQVQEM | | 447.469 | 4 | 1786.854 | 1786.854 | 0 | 0.2 | 1208 | 370.1 | 370.1 | 370.1 | 7.47 |
| | AGK.I | | | | | | | | | | | | |
| 1012 | R.ATHYHLSSQVQEM | | 447.469 | 4 | 1786.856 | 1786.854 | 0 | 0.8 | 1208 | 366.9 | 366.9 | 366.9 | 7.72 |
| | AGK.I | | | | | | | | | | | | |
| 1012 | R.ATHYHLSSQVQEM | | 447.469 | 4 | 1786.855 | 1786.854 | 0 | 0.6 | 1208 | 364.9 | 364.9 | 364.9 | 7.47 |
| | AGK.I | | | | | | | | | | | | |
| 1562 | R.ATHYHLSSQVQEM | M[+16] | 451.468 | 4 | 1802.849 | 1802.849 | 0 | −0.1 | 1208 | 356.1 | 356.1 | 356.1 | 6.09 |
| | [+15.995]AGK.I | | | | | | | | | | | | |
| 1562 | R.ATHYHLSSQVQEM | M[+16] | 451.468 | 4 | 1802.850 | 1802.849 | 0 | 0.3 | 1208 | 344.9 | 344.9 | 344.9 | 5.86 |
| | [+15.995]AGK.I | | | | | | | | | | | | |
| 3483 | K.IDLLRDSHIFQLF | | 490.521 | 4 | 1959.061 | 1959.060 | 0 | 0.6 | 1224 | 356.2 | 356.2 | 356.2 | 5.89 |
| | WR.E | | | | | | | | | | | | |
| 838 | R.DSHIFQLFWR.E | | 674.844 | 2 | 1348.680 | 1348.680 | 0 | 0.2 | 1229 | 580.1 | 419.8 | 419.8 | 8.86 |
| 838 | R.DSHIFQLFWR.E | | 450.232 | 3 | 1348.680 | 1348.680 | 0 | 0.2 | 1229 | 500.4 | 500.4 | 500.4 | 7.81 |
| 1468 | R.EAAEPLSEPKEDQ | S[+80] | 1383.883 | 4 | 5532.510 | 5532.505 | 0 | 0.8 | 1239 | 770.3 | 762.8 | 45.5 | 12.66 |
| | EAAELLS | | | | | | | | | | | | |
| | [+79.966] | | | | | | | | | | | | |
| | EPEEESERHILELE | | | | | | | | | | | | |
| | EVYDYLYQPSYR.K | | | | | | | | | | | | |
| 1380 | R.EAAEPLSEPKEDQ | | 1363.893 | 4 | 5452.550 | 5452.539 | 0 | 1.9 | 1239 | 732.7 | 730.8 | 730.8 | 11.66 |
| | EAAELLSEPEEESER | | | | | | | | | | | | |
| | HILELEEVYDYLYQP | | | | | | | | | | | | |
| | SYR.K | | | | | | | | | | | | |
| 1380 | R.EAAEPLSEPKEDQ | | 1091.315 | 5 | 5452.548 | 5452.539 | 0 | 1.6 | 1239 | 724.6 | 724.6 | 724.6 | 11.66 |
| | EAAELLSEPEEESER | | | | | | | | | | | | |
| | HILELEEVYDYLYQP | | | | | | | | | | | | |
| | SYR.K | | | | | | | | | | | | |
| 1299 | R.EAAEPLSEPKEDQ | | 1047.813 | 3 | 3141.424 | 3141.423 | 0 | 0.4 | 1239 | 621.9 | 621.9 | 621.9 | 10.39 |
| | EAAELLSEPEEESER | | | | | | | | | | | | |
| | .H | | | | | | | | | | | | |
| 1469 | R.EAAEPLSEPKEDQ | S[+80] | 1107.308 | 5 | 5532.509 | 5532.505 | 0 | 0.6 | 1239 | 565.7 | 565.7 | 11.6 | 8.66 |
| | EAAELLSEPEEES | | | | | | | | | | | | |
| | [+79.966]ERHI | | | | | | | | | | | | |
| | LELE | | | | | | | | | | | | |
| | EVYDYLYQPSYR.K | | | | | | | | | | | | |
| 3065 | R.EAAEPLSEPKEDQ | Y[+80] | 1383.888 | 4 | 5532.529 | 5532.505 | 0 | 4.2 | 1239 | 537.2 | 375.6 | 10.9 | 5.22 |
| | EAAELLSEPEEESER | | | | | | | | | | | | |
| | HILELEEVY | | | | | | | | | | | | |
| | [+79.966] | | | | | | | | | | | | |
| | DYLYQPSYR.K | | | | | | | | | | | | |
| 1897 | R.KFIKLHQDLK.S | | 423.928 | 3 | 1269.768 | 1269.768 | 0 | 0.0 | 1285 | 449.5 | 449.5 | 449.5 | 5.75 |
| 1897 | R.KFIKLHQDLK.S | | 423.928 | 3 | 1269.768 | 1269.768 | 0 | 0.0 | 1285 | 316.5 | 316.5 | 316.5 | 3.67 |
| 2161 | K.DRVEQIKEYHHLH | | 402.382 | 6 | 2409.253 | 2409.253 | 0 | −0.3 | 1338 | 336.2 | 336.2 | 336.2 | 4.20 |
| | QAVHAAK.V | | | | | | | | | | | | |
| 1892 | R.VEQIKEYHHLHQA | | 428.431 | 5 | 2138.126 | 2138.125 | 0 | 0.4 | 1340 | 320.5 | 300.6 | 300.6 | 4.13 |
| | VHAAK.V | | | | | | | | | | | | |
| 1892 | R.VEQIKEYHHLHQA | | 428.431 | 5 | 2138.126 | 2138.125 | 0 | 0.5 | 1340 | 302.6 | 302.6 | 302.6 | 4.20 |
| | VHAAK.V | | | | | | | | | | | | |
| 946 | R.ETLDQINQELIQA | | 821.936 | 2 | 1642.865 | 1642.865 | 0 | 0.3 | 1391 | 705.7 | 705.7 | 705.7 | 12.96 |
| | K.K | | | | | | | | | | | | |
| 1077 | R.ETLDQINQELIQA | | 885.983 | 2 | 1770.959 | 1770.960 | 0 | 0.4 | 1391 | 586.9 | 559.6 | 559.6 | 9.06 |
| | KK.L | | | | | | | | | | | | |
| 1077 | R.ETLDQINQELIQA | | 590.991 | 3 | 1770.959 | 1770.960 | 0 | 0.5 | 1391 | 551.3 | 551.3 | 551.3 | 8.23 |
| | KK.L | | | | | | | | | | | | |
| 946 | R.ETLDQINQELIQA | | 821.936 | 2 | 1642.865 | 1642.865 | 0 | 0.2 | 1391 | 530.5 | 530.5 | 530.5 | 9.12 |
| | K.K | | | | | | | | | | | | |
| 946 | R.ETLDQINQELIQA | | 548.293 | 3 | 1642.865 | 1642.865 | 0 | 0.3 | 1391 | 513.9 | 513.9 | 513.9 | 7.59 |
| | K.K | | | | | | | | | | | | |
| 946 | R.ETLDQINQELIQA | | 821.936 | 2 | 1642.865 | 1642.865 | 0 | 0.2 | 1391 | 459.6 | 459.6 | 459.6 | 8.67 |
| | K.K | | | | | | | | | | | | |
| 1101 | K.KLLQDISEAR.C | | 586.835 | 2 | 1172.663 | 1172.663 | 0 | −0.5 | 1405 | 592.0 | 592.0 | 592.0 | 7.91 |
| 998 | K.LLQDISEAR.C | | 522.788 | 2 | 1044.568 | 1044.568 | 0 | −0.2 | 1406 | 549.9 | 283.8 | 283.8 | 6.35 |
| 998 | K.LLQDISEAR.C | | 522.788 | 2 | 1044.568 | 1044.568 | 0 | 0.0 | 1406 | 363.9 | 194.1 | 194.1 | 4.97 |
| 1029 | K.ALDKDQYLPRK.L | | 449.586 | 3 | 1346.743 | 1346.743 | 0 | 0.2 | 1498 | 558.3 | 558.3 | 558.3 | 7.52 |
| 2191 | K.ALDKDQYLPR.K | | 407.222 | 3 | 1219.651 | 1218.648 | 1 | 0.0 | 1498 | 458.7 | 458.7 | 458.7 | 5.65 |
| 2191 | K.ALDKDQYLPR.K | | 609.828 | 2 | 1218.648 | 1218.648 | 0 | 0.4 | 1498 | 437.3 | 437.3 | 437.3 | 6.80 |
| 832 | R.NLEWLKTVNESHG | | 500.256 | 4 | 1998.004 | 1998.004 | 0 | −0.2 | 1515 | 490.0 | 490.0 | 490.0 | 7.99 |
| | SVER.S | | | | | | | | | | | | |
| 832 | R.NLEWLKTVNESHG | | 500.257 | 4 | 1998.005 | 1998.004 | 0 | 0.3 | 1515 | 480.8 | 480.8 | 480.8 | 8.72 |
| | SVER.S | | | | | | | | | | | | |
| 1766 | R.NLEWLK.T | | 401.727 | 2 | 802.446 | 802.446 | 0 | 0.3 | 1515 | 310.0 | 210.0 | 210.0 | 5.01 |
| 1766 | R.NLEWLK.T | | 401.727 | 2 | 802.446 | 802.446 | 0 | 0.1 | 1515 | 300.9 | 229.0 | 229.0 | 5.01 |
| 2033 | K.TVNESHGSVER.S | | 405.531 | 3 | 1214.578 | 1214.576 | 0 | 1.3 | 1521 | 318.1 | 318.1 | 318.1 | 5.40 |
| 808 | R.SSLTLATAINQR. | | 637.857 | 2 | 1274.706 | 1274.706 | 0 | 0.1 | 1532 | 711.7 | 711.7 | 711.7 | 12.59 |
| | G | | | | | | | | | | | | |
| 808 | R.SSLTLATAINQR. | | 637.857 | 2 | 1274.707 | 1274.706 | 0 | 0.4 | 1532 | 668.6 | 668.6 | 668.6 | 10.86 |
| | G | | | | | | | | | | | | |
| 808 | R.SSLTLATAINQR. | | 637.857 | 2 | 1274.707 | 1274.706 | 0 | 0.1 | 1532 | 603.6 | 603.6 | 603.6 | 9.86 |
| | G | | | | | | | | | | | | |
| 808 | R.SSLTLATAINQR. | | 637.857 | 2 | 1274.706 | 1274.706 | 0 | 0.3 | 1532 | 556.2 | 1556.2 | 556.2 | 8.75 |
| | G | | | | | | | | | | | | |
| 808 | R.SSLTLATAINQR. | | 637.857 | 2 | 1274.707 | 1274.706 | 0 | 0.1 | 1532 | 508.2 | 508.2 | 508.2 | 7.81 |
| | G | | | | | | | | | | | | |
| 808 | R.SSLTLATAINQR. | | 425.574 | 3 | 1274.706 | 1274.706 | 0 | 0.1 | 1532 | 487.6 | 487.6 | 487.6 | 7.22 |
| | G | | | | | | | | | | | | |
| 808 | R.SSLTLATAINQR. | | 425.574 | 3 | 1274.706 | 1274.706 | 0 | 0.2 | 1532 | 470.6 | 470.6 | 470.6 | 6.97 |
| | G | | | | | | | | | | | | |
| 808 | R.SSLTLATAINQR. | | 637.857 | 2 | 1274.707 | 1274.706 | 0 | 0.5 | 1532 | 422.5 | 422.5 | 422.5 | 7.22 |
| | G | | | | | | | | | | | | |
| 808 | R.SSLTLATAINQR. | | 637.857 | 2 | 1274.707 | 1274.706 | 0 | 0.1 | 1532 | 416.3 | 416.3 | 416.3 | 7.46 |
| | G | | | | | | | | | | | | |
| 808 | R.SSLTLATAINQR. | | 637.857 | 2 | 1274.706 | 1274.706 | 0 | 0.2 | 1532 | 375.4 | 375.4 | 375.4 | 6.87 |
| | G | | | | | | | | | | | | |
| 813 | R.GIYVIQAPK.G | | 494.795 | 2 | 988.583 | 988.583 | 0 | 0.0 | 1544 | 476.8 | 387.2 | 387.2 | 7.33 |
| 1331 | K.ISPDTVLHLILPE | | 604.065 | 4 | 2413.236 | 2413.236 | 0 | 0.1 | 1557 | 687.9 | 687.9 | 687.9 | 11.96 |
| | SPGSHEESR.E | | | | | | | | | | | | |
| 937 | K.ISPDTVLHLILPE | | 997.769 | 4 | 3988.055 | 3988.055 | 0 | 0.1 | 1557 | 474.0 | 474.0 | 474.0 | 5.43 |
| | SPGSHEESREYSLEE | | | | | | | | | | | | |
| | VKELLNK.L | | | | | | | | | | | | |
| 937 | K.ISPDTVLHLILPE | | 997.770 | 4 | 3988.057 | 3988.055 | 0 | 0.5 | 1557 | 458.3 | 458.3 | 458.3 | 5.20 |
| | SPGSHEESREYSLEE | | | | | | | | | | | | |
| | VKELLNK.L | | | | | | | | | | | | |
| 937 | K.ISPDTVLHLILPE | | 665.516 | 6 | 3988.058 | 3988.055 | 0 | 0.8 | 1557 | 417.5 | 417.5 | 417.5 | 7.67 |
| | SPGSHEESREYSLEE | | | | | | | | | | | | |
| | VKELLNK.L | | | | | | | | | | | | |
| 937 | K.ISPDTVLHLILPE | | 665.516 | 6 | 3988.058 | 3988.055 | 0 | 0.6 | 1557 | 365.1 | 365.1 | 365.1 | 6.83 |
| | SPGSHEESREYSLEE | | | | | | | | | | | | |
| | VKELLNK.L | | | | | | | | | | | | |
| 937 | K.ISPDTVLHLILPE | | 665.516 | 6 | 3988.057 | 3988.055 | 0 | 0.5 | 1557 | 363.3 | 363.3 | 363.3 | 6.36 |
| | SPGSHEESREYSLEE | | | | | | | | | | | | |
| | VKELLNK.L | | | | | | | | | | | | |
| 937 | K.ISPDTVLHLILPE | | 798.417 | 5 | 3988.057 | 3988.055 | 0 | 0.4 | 1557 | 333.6 | 333.6 | 333.6 | 4.81 |
| | SPGSHEESREYSLEE | | | | | | | | | | | | |
| | VKELLNK.L | | | | | | | | | | | | |
| 937 | K.ISPDTVLHLILPE | | 798.417 | 5 | 3988.057 | 3988.055 | 0 | 0.5 | 1557 | 326.9 | 326.9 | 326.9 | 5.44 |
| | SPGSHEESREYSLEE | | | | | | | | | | | | |
| | VKELLNK.L | | | | | | | | | | | | |
| 982 | R.EYSLEEVKELLNK | | 531.950 | 3 | 1593.836 | 1593.837 | 0 | −0.4 | 1579 | 522.4 | 522.4 | 522.4 | 7.85 |
| | .L | | | | | | | | | | | | |
| 1718 | R.NNTEVERFSEVFC | C[+57] | 700.997 | 3 | 2100.977 | 2100.977 | 0 | 0.0 | 1602 | 498.1 | 498.1 | 498.1 | 7.99 |
| | [+57.021]SVQR.L | | | | | | | | | | | | |
| 1718 | R.NNTEVERFSEVFC | C[+57] | 700.997 | 3 | 2100.977 | 2100.977 | 0 | 0.2 | 1602 | 415.5 | 415.5 | 415.5 | 7.17 |
| | [+57.021]SVQR.L | | | | | | | | | | | | |
| 3334 | R.FSEVFC | C[+57] | 629.798 | 2 | 1258.588 | 1258.589 | 0 | −0.1 | 1609 | 544.1 | 544.1 | 544.1 | 7.78 |
| | [+57.021] | | | | | | | | | | | | |
| | SVQR.L | | | | | | | | | | | | |
| 928 | R.LSQAFIDLHSAGN | | 641.000 | 3 | 1920.985 | 1919.980 | 1 | 0.9 | 1619 | 492.9 | 492.9 | 492.9 | 8.91 |
| | MLFR.T | | | | | | | | | | | | |
| 1595 | R.LSQAFIDLHSAGN | M[+16] | 645.997 | 3 | 1935.975 | 1935.975 | 0 | 0.4 | 1619 | 407.2 | 407.2 | 407.2 | 7.59 |
| | M[+15.995]LFR.T | | | | | | | | | | | | |
| 899 | R.KQPPSDAALTMLS | | 582.987 | 3 | 1746.946 | 1746.946 | 0 | 0.2 | 1718 | 503.6 | 503.6 | 503.6 | 8.18 |
| | FIK.S | | | | | | | | | | | | |
| 899 | R.KQPPSDAALTMLS | | 582.987 | 3 | 1746.945 | 1746.946 | 0 | 0.6 | 1718 | 470.6 | 470.6 | 470.6 | 7.23 |
| | FIK.S | | | | | | | | | | | | |
| 899 | R.KQPPSDAALTMLS | | 582.987 | 3 | 1746.945 | 1746.946 | 0 | 0.3 | 1718 | 403.6 | 403.6 | 403.6 | 6.88 |
| | FIK.S | | | | | | | | | | | | |
| 899 | R.KQPPSDAALTMLS | | 873.976 | 2 | 1746.945 | 1746.946 | 0 | 0.6 | 1718 | 374.7 | 374.7 | 374.7 | 6.77 |
| | FIK.S | | | | | | | | | | | | |
| 899 | R.KQPPSDAALTMLS | | 873.976 | 2 | 1746.946 | 1746.946 | 0 | 0.2 | 1718 | 343.5 | 343.5 | 343.5 | 5.86 |
| | FIK.S | | | | | | | | | | | | |
| 899 | R.KQPPSDAALTMLS | | 873.977 | 2 | 1746.946 | 1746.946 | 0 | 0.3 | 1718 | 313.8 | 313.8 | 313.8 | 6.00 |
| | FIK.S | | | | | | | | | | | | |
| 809 | K.QPPSDAALTMLSF | | 540.289 | 3 | 1618.851 | 1618.851 | 0 | 0.3 | 1719 | 462.1 | 462.1 | 462.1 | 8.07 |
| | IK.S | | | | | | | | | | | | |
| 809 | K.QPPSDAALTMLSF | | 540.289 | 3 | 1618.851 | 1618.851 | 0 | 0.2 | 1719 | 455.9 | 455.9 | 455.9 | 7.10 |
| | IK.S | | | | | | | | | | | | |
| 809 | K.QPPSDAALTMLSF | | 540.288 | 3 | 1618.850 | 1618.851 | 0 | −0.4 | 1719 | 455.1 | 455.1 | 455.1 | 6.64 |
| | IK.S | | | | | | | | | | | | |
| 809 | K.QPPSDAALTMLSF | | 809.930 | 2 | 1618.853 | 1618.851 | 0 | 1.0 | 1719 | 434.7 | 434.7 | 434.7 | 8.56 |
| | IK.S | | | | | | | | | | | | |
| 809 | K.QPPSDAALTMLSF | | 809.929 | 2 | 1618.851 | 1618.851 | 0 | 0.2 | 1719 | 401.8 | 401.8 | 401.8 | 7.59 |
| | IK.S | | | | | | | | | | | | |
| 809 | K.QPPSDAALTMLSF | | 809.930 | 2 | 1618.852 | 1618.851 | 0 | 0.6 | 1719 | 400.3 | 400.3 | 400.3 | 7.59 |
| | IK.S | | | | | | | | | | | | |
| 1683 | K.SNC[+57.021]T | C[+57] | 411.884 | 3 | 1233.637 | 1233.637 | 0 | 0.1 | 1734 | 304.8 | 304.8 | 304.8 | 5.21 |
| | LRDVLR.A | | | | | | | | | | | | |
| 1312 | R.RVMEELPLMLLSE | | 630.350 | 4 | 2518.380 | 2518.377 | 0 | 1.1 | 1759 | 736.8 | 736.8 | 736.8 | 12.77 |
| | FSLVDKLR.I | | | | | | | | | | | | |
| 1312 | R.RVMEELPLMLLSE | | 840.132 | 3 | 2518.381 | 2518.377 | 0 | 1.5 | 1759 | 670.2 | 670.2 | 670.2 | 11.77 |
| | FSLVDKLR.I | | | | | | | | | | | | |
| 1633 | R.RVMEELPLM | M[+16] | 634.349 | 4 | 2534.375 | 2534.372 | 0 | 1.1 | 1759 | 652.7 | 652.7 | 346.7 | 11.77 |
| | [+15.995]LL | | | | | | | | | | | | |
| | SEFSLVDK | | | | | | | | | | | | |
| | LR.I | | | | | | | | | | | | |
| 1003 | R.RVMEELPLMLLSE | | 750.403 | 3 | 2249.193 | 2249.192 | 0 | 0.6 | 1759 | 526.7 | 526.7 | 526.7 | 9.12 |
| | FSLVDK.L | | | | | | | | | | | | |
| 1633 | R.RVMEELPLM | M[+16] | 845.463 | 3 | 2534.375 | 2534.372 | 0 | 1.1 | 1759 | 491.5 | 491.5 | 129.8 | 7.75 |
| | [+15.995]L | | | | | | | | | | | | |
| | LSEFSLVDK | | | | | | | | | | | | |
| | LR.I | | | | | | | | | | | | |
| 1593 | R.RVMEELPLM | M[+16] | 755.735 | 3 | 2265.189 | 2265.187 | 0 | 0.9 | 1759 | 366.2 | 366.2 | 167.8 | 7.47 |
| | [+15.995]L | | | | | | | | | | | | |
| | LSEFSLVDK | | | | | | | | | | | | |
| | .L | | | | | | | | | | | | |
| 1312 | R.RVMEELPLMLLSE | | 840.131 | 3 | 2518.378 | 2518.377 | 0 | 0.2 | 1759 | 340.6 | 340.6 | 340.6 | 5.66 |
| | FSLVDKLR.I | | | | | | | | | | | | |
| 862 | R.VMEELPLMLLSEF | | 788.098 | 3 | 2362.279 | 2362.276 | 0 | 1.1 | 1760 | 788.8 | 788.8 | 788.8 | 13.77 |
| | SLVDKLR.I | | | | | | | | | | | | |
| 1626 | R.VM[+15.995]EE | M[+16] | 793.428 | 3 | 2378.271 | 2378.271 | 0 | 0.2 | 1760 | 779.4 | 779.4 | 493.6 | 13.77 |
| | LPLMLLSEFSLVDKL | | | | | | | | | | | | |
| | R.I | | | | | | | | | | | | |
| 862 | R.VMEELPLMLLSEF | | 788.098 | 3 | 2362.278 | 2362.276 | 0 | 1.0 | 1760 | 738.7 | 738.7 | 738.7 | 12.77 |
| | SLVDKLR.I | | | | | | | | | | | | |
| 1606 | R.VMEELPLM | M[+16] | 793.429 | 3 | 2378.272 | 2378.271 | 0 | 0.4 | 1760 | 721.2 | 721.2 | 548.6 | 12.77 |
| | [+15.995]L | | | | | | | | | | | | |
| | LSEFSLVDKL | | | | | | | | | | | | |
| | R.I | | | | | | | | | | | | |
| 862 | R.VMEELPLMLLSEF | | 788.431 | 3 | 2363.279 | 2362.276 | 1 | 0.0 | 1760 | 705.0 | 705.0 | 705.0 | 12.77 |
| | SLVDKLR.I | | | | | | | | | | | | |
| 862 | R.VMEELPLMLLSEF | | 788.097 | 3 | 2362.278 | 2362.276 | 0 | 0.7 | 1760 | 691.5 | 691.5 | 691.5 | 11.77 |
| | SLVDKLR.I | | | | | | | | | | | | |
| 1606 | R.VMEELPLM | M[+16] | 793.430 | 3 | 2378.274 | 2378.271 | 0 | 1.4 | 1760 | 676.3 | 676.3 | 267.1 | 11.77 |
| | [+15.995]L | | | | | | | | | | | | |
| | LSEFSLVDKL | | | | | | | | | | | | |
| | R.I | | | | | | | | | | | | |
| 1626 | R.VM[+15.995]EE | M[+16] | 793.428 | 3 | 2378.271 | 2378.271 | 0 | 0.1 | 1760 | 671.1 | 671.1 | 400.2 | 11.77 |
| | LPLMLLSEFSLVDKL | | | | | | | | | | | | |
| | R.I | | | | | | | | | | | | |
| 1606 | R.VMEELPLM[+15. | M[+16] | 1189.640 | 2 | 2378.272 | 2378.271 | 0 | 0.6 | 1760 | 668.2 | 668.2 | 397.5 | 11.77 |
| | 995]LLSEFSLVDKL | | | | | | | | | | | | |
| | R.I | | | | | | | | | | | | |
| 1606 | R.VMEELPLM[+15. | M[+16] | 595.324 | 4 | 2378.273 | 2378.271 | 0 | 0.7 | 1760 | 644.3 | 644.3 | 282.9 | 10.17 |
| | 995]LLSEFSLVDKL | | | | | | | | | | | | |
| | R.I | | | | | | | | | | | | |
| 862 | R.VMEELPLMLLSEF | | 1181.641 | 2 | 2362.275 | 2362.276 | 0 | −0.5 | 1760 | 642.3 | 642.3 | 642.3 | 10.06 |
| | SLVDKLR.I | | | | | | | | | | | | |
| 1626 | R.VM[+15.995]EE | M[+16] | 793.428 | 3 | 2378.269 | 2378.271 | 0 | −0.9 | 1760 | 629.4 | 629.4 | 96.3 | 10.06 |
| | LPLMLLSEFSLVDKL | | | | | | | | | | | | |
| | R.I | | | | | | | | | | | | |
| 1082 | R.VMEELPLMLLSEF | | 1047.050 | 2 | 2093.093 | 2093.091 | 0 | 1.0 | 1760 | 624.2 | 624.2 | 624.2 | 10.96 |
| | SLVDK.L | | | | | | | | | | | | |
| 1606 | R.VMEELPLM[+15. | M[+16] | 793.430 | 3 | 2378.274 | 2378.271 | 0 | 1.4 | 1760 | 612.1 | 612.1 | 417.1 | 10.77 |
| | 995]LLSEFSLVDKL | | | | | | | | | | | | |
| | R.I | | | | | | | | | | | | |
| 1082 | R.VMEELPLMLLSEF | | 698.369 | 3 | 2093.093 | 2093.091 | 0 | 0.9 | 1760 | 576.2 | 576.2 | 576.2 | 9.37 |
| | SLVDK.L | | | | | | | | | | | | |
| 1614 | R.VMEELPLM[+15. | M[+16] | 703.700 | 3 | 2109.085 | 2109.086 | 0 | −0.2 | 1760 | 517.4 | 517.4 | 395.0 | 8.32 |
| | 995]LLSEFSLVDK. | | | | | | | | | | | | |
| | L | | | | | | | | | | | | |
| 1529 | R.VM[+15.995]EE | M[+16] | 1055.048 | 2 | 2109.088 | 2109.086 | 0 | 1.2 | 1760 | 501.4 | 414.2 | 1287.5 | 8.18 |
| | LPLMLLSEFSLVDK. | | | | | | | | | | | | |
| | L | | | | | | | | | | | | |
| 862 | R.VMEELPLMLLSEF | | 788.424 | 3 | 2363.258 | 2362.276 | 1 | −9.0 | 1760 | 454.3 | 454.3 | 454.3 | 5.82 |
| | SLVDKLR.I | | | | | | | | | | | | |
| 862 | R.VMEELPLMLLSEF | | 788.097 | 3 | 2362.277 | 2362.276 | 0 | 0.6 | 1760 | 129.4 | 429.4 | 429.4 | 7.40 |
| | SLVDKLR.I | | | | | | | | | | | | |
| 862 | R.VMEELPLMLLSEF | | 788.097 | 3 | 2362.277 | 2362.276 | 0 | 0.6 | 1760 | 420.9 | 420.9 | 420.9 | 7.40 |
| | SLVDKLR.I | | | | | | | | | | | | |
| 1614 | R.VMEELPLM[+15. | M[+16] | 1055.046 | 2 | 2109.085 | 2109.086 | 0 | −0.2 | 1760 | 384.6 | 384.6 | 234.1 | 7.72 |
| | 995]LLSEFSLVDK. | | | | | | | | | | | | |
| | L | | | | | | | | | | | | |
| 862 | R.VMEELPLMLLSEF | | 788.098 | 3 | 2362.278 | 2362.276 | 0 | 0.9 | 1760 | 362.0 | 362.0 | 362.0 | 7.28 |
| | SLVDKLR.I | | | | | | | | | | | | |
| 834 | R.IIMEQSMR.C | | 504.254 | 2 | 1007.502 | 1007.501 | 0 | 0.2 | 1780 | 486.8 | 486.8 | 486.8 | 7.34 |
| 834 | R.IIMEQSMR.C | | 504.254 | 2 | 1007.502 | 1007.501 | 0 | 0.2 | 1780 | 461.0 | 461.0 | 461.0 | 7.10 |
| 834 | R.IIMEQSMR.C | | 504.254 | 2 | 1007.501 | 1007.501 | 0 | 0.1 | 1780 | 382.8 | 382.8 | 382.8 | 16.72 |
| 834 | R.IIMEQSMR.C | | 504.254 | 2 | 1007.501 | 1007.501 | 0 | −0.1 | 1780 | 379.6 | 379.6 | 379.6 | 6.87 |
| 834 | R.IIMEQSMR.C | | 504.254 | 2 | 1007.501 | 1007.501 | 0 | 0.0 | 1780 | 368.7 | 368.7 | 368.7 | 6.72 |
| 834 | R.IIMEQSMR.C | | 504.254 | 2 | 1007.502 | 1007.501 | 0 | 0.3 | 1780 | 368.6 | 368.6 | 368.6 | 16.72 |
| 1531 | R.IIM[+15.995]E | M[+16] | 512.252 | 2 | 1023.496 | 1023.496 | 0 | 0.1 | 1780 | 366.5 | 366.5 | 4.4 | 6.72 |
| | QSMR.C | | | | | | | | | | | | |
| 834 | R.IIMEQSMR.C | | 504.254 | 2 | 1007.501 | 1007.501 | 0 | 0.1 | 1780 | 334.2 | 334.2 | 334.2 | 5.33 |
| 849 | K.VYSLLFADQLSYE | | 937.489 | 2 | 1873.971 | 1873.969 | 0 | 0.7 | 1891 | 434.3 | 427.9 | 427.9 | 7.83 |
| | VAR.Q | | | | | | | | | | | | |
| 4629 | R.EDYQLVMVC | C[+57] | 743.979 | 8 | 5944.781 | 5943.780 | 1 | −0.4 | 1922 | 308.1 | 308.1 | 25.4 | 2.53 |
| | [+57.021] | *2, | | | | | | | | | | | |
| | DGDWEHC | Y[+80] | | | | | | | | | | | |
| | [+57.021]Y | | | | | | | | | | | | |
| | [+79.966]LP | | | | | | | | | | | | |
| | SAFSQHKVFVTP | | | | | | | | | | | | |
| | QAPLEAIQAYLAGHY | | | | | | | | | | | | |
| | RVPK.Q | | | | | | | | | | | | |
| 851 | K.VFVTPQAPLEAIQ | | 667.871 | 4 | 2668.462 | 2668.461 | 0 | 0.3 | 1948 | 861.5 | 861.5 | 861.5 | 15.65 |
| | AYLAGHYRVPK.Q | | | | | | | | | | | | |
| 1411 | K.VFVTPQAPLEAIQ | | 782.087 | 3 | 2344.245 | 2344.245 | 0 | 0.0 | 1948 | 763.7 | 763.7 | 763.7 | 13.96 |
| | AYLAGHYR.V | | | | | | | | | | | | |
| 851 | K.VFVTPQAPLEAIQ | | 667.871 | 4 | 2668.462 | 2668.461 | 0 | 0.5 | 1948 | 699.3 | 699.3 | 699.3 | 11.77 |
| | AYLAGHYRVPK.Q | | | | | | | | | | | | |
| 851 | K.VFVTPQAPLEAIQ | | 890.159 | 3 | 2668.462 | 2668.461 | 0 | 0.5 | 1948 | 479.5 | 479.5 | 479.5 | 7.28 |
| | AYLAGHYRVPK.Q | | | | | | | | | | | | |
| 959 | K.VFVTPQAPLEAIQ | | 789.226 | 5 | 3942.102 | 3942.103 | 0 | 0.0 | 1948 | 474.8 | 424.3 | 424.3 | 6.64 |
| | AYLAGHYRVPKQTLS | | | | | | | | | | | | |
| | AAAVFNDR.L | | | | | | | | | | | | |
| 814 | K.QTLSAAAVFNDR. | | 646.833 | 2 | 1292.660 | 1292.659 | 0 | 0.1 | 1972 | 681.5 | 603.1 | 603.1 | 11.59 |
| | L | | | | | | | | | | | | |
| 814 | K.QTLSAAAVFNDR. | | 646.834 | 2 | 1292.660 | 1292.659 | 0 | 0.5 | 1972 | 494.8 | 445.2 | 445.2 | 7.81 |
| | L | | | | | | | | | | | | |
| 814 | K.QTLSAAAVFNDR. | | 646.834 | 2 | 1292.660 | 1292.659 | 0 | 0.4 | 1972 | 465.2 | 419.8 | 419.8 | 7.57 |
| | L | | | | | | | | | | | | |
| 814 | K.QTLSAAAVFNDR. | | 646.834 | 2 | 1292.660 | 1292.659 | 0 | 0.5 | 1972 | 389.5 | 354.3 | 354.3 | 5.82 |
| | L | | | | | | | | | | | | |
| 910 | K.MQLNVKNVPLKTI | | 551.999 | 3 | 1653.983 | 1653.983 | 0 | 0.1 | 2011 | 621.1 | 621.1 | 621.1 | 10.46 |
| | R.L | | | | | | | | | | | | |
| 1009 | R.LIDPQVDESR.V | | 586.301 | 2 | 1171.595 | 1171.595 | 0 | −0.2 | 2025 | 549.4 | 388.1 | 388.1 | 8.02 |
| 1244 | R.LIDPQVDESRVLG | | 707.886 | 4 | 2828.522 | 2828.519 | 0 | 1.0 | 2025 | 358.2 | 358.2 | 358.2 | 4.91 |
| | ALLPFLDAQYQK.V | | | | | | | | | | | | |
| 871 | R.VLGALLPFLDAQY | | 559.319 | 3 | 1675.943 | 1675.942 | 0 | 0.6 | 2035 | 567.7 | 567.7 | 567.7 | 9.37 |
| | QK.V | | | | | | | | | | | | |
| 871 | R.VLGALLPFLDAQY | | 838.475 | 2 | 1675.943 | 1675.942 | 0 | 1.0 | 2035 | 492.2 | 492.2 | 492.2 | 8.91 |
| | QK.V | | | | | | | | | | | | |
| 843 | R.TRVPQFSFLDIFP | | 847.967 | 2 | 1694.926 | 1694.927 | 0 | −0.3 | 2116 | 562.4 | 562.4 | 562.4 | 8.34 |
| | K.V | | | | | | | | | | | | |
| 843 | R.TRVPQFSFLDIFP | | 565.647 | 3 | 1694.928 | 1694.927 | 0 | 0.6 | 2116 | 559.5 | 559.5 | 559.5 | 8.20 |
| | K.V | | | | | | | | | | | | |
| 843 | R.TRVPQFSFLDIFP | | 565.647 | 3 | 1694.926 | 1694.927 | 0 | −0.4 | 2116 | 559.0 | 559.0 | 559.0 | 8.23 |
| | K.V | | | | | | | | | | | | |
| 843 | R.TRVPQFSFLDIFP | | 565.647 | 3 | 1694.927 | 1694.927 | 0 | 0.4 | 2116 | 506.6 | 506.6 | 506.6 | 7.99 |
| | K.V | | | | | | | | | | | | |
| 843 | R.TRVPQFSFLDIFP | | 847.966 | 2 | 1694.925 | 1694.927 | 0 | −0.9 | 2116 | 497.5 | 497.5 | 497.5 | 7.28 |
| | K.V | | | | | | | | | | | | |
| 843 | R.TRVPQFSFLDIFP | | 565.647 | 3 | 1694.926 | 1694.927 | 0 | 0.1 | 2116 | 484.3 | 484.3 | 484.3 | 8.72 |
| | K.V | | | | | | | | | | | | |
| 843 | R.TRVPQFSFLDIFP | | 565.647 | 3 | 1694.926 | 1694.927 | 0 | −0.3 | 2116 | 454.2 | 454.2 | 454.2 | 7.75 |
| | K.V | | | | | | | | | | | | |
| 843 | R.TRVPQFSFLDIFP | | 565.647 | 3 | 1694.928 | 1694.927 | 10 | 0.6 | 2116 | 441.9 | 441.9 | 441.9 | 7.75 |
| | K.V | | | | | | | | | | | | |
| 843 | R.TRVPQFSFLDIFP | | 565.647 | 3 | 1694.928 | 1694.927 | 0 | 0.6 | 2116 | 427.1 | 427.1 | 427.1 | 7.40 |
| | K.V | | | | | | | | | | | | |
| 843 | R.TRVPQFSFLDIFP | | 565.647 | 3 | 1694.927 | 1694.927 | 0 | 0.3 | 2116 | 399.2 | 399.2 | 399.2 | 8.25 |
| | K.V | | | | | | | | | | | | |
| 843 | R.TRVPQFSFLDIFP | | 565.647 | 3 | 1694.928 | 1694.927 | 0 | 0.6 | 2116 | 375.4 | 375.4 | 375.4 | 7.28 |
| | K.V | | | | | | | | | | | | |
| 830 | R.VPQFSFLDIFPK. | | 719.393 | 2 | 1437.779 | 1437.778 | 0 | 0.8 | 2118 | 626.8 | 626.8 | 626.8 | 10.59 |
| | V | | | | | | | | | | | | |
| 830 | R.VPQFSFLDIFPK. | | 719.393 | 2 | 1437.778 | 1437.778 | 0 | 0.5 | 2118 | 522.6 | 522.6 | 522.6 | 7.78 |
| | V | | | | | | | | | | | | |
| 830 | R.VPQFSFLDIFPK. | | 479.931 | 3 | 1437.779 | 1437.778 | 0 | 0.7 | 2118 | 481.0 | 481.0 | 481.0 | 7.22 |
| | V | | | | | | | | | | | | |
| 830 | R.VPQFSFLDIFPK. | | 479.931 | 3 | 1437.778 | 1437.778 | 0 | 0.4 | 2118 | 468.3 | 468.3 | 468.3 | 6.73 |
| | V | | | | | | | | | | | | |
| 1740 | R.SDTEPGMDLWEFC | | 1052.468 | 3 | 3155.390 | 3155.387 | 0 | 0.8 | 2148 | 675.9 | 675.9 | 675.9 | 11.58 |
| | [+57.021]SETFQR | | | | | | | | | | | | |
| | PYQYLR.RC[+57] | | | | | | | | | | | | |
| 3308 | R.SDTEPGMDLWEFC | | 829.129 | 4 | 3313.496 | 3311.489 | 2 | 0.1 | 2148 | 420.0 | 420.0 | 420.0 | 6.63 |
| | [+57.021]SETFQR | | | | | | | | | | | | |
| | PYQYLRR.FC[+57] | | | | | | | | | | | | |
| 1773 | R.FLNYQLR.D | | 477.264 | 2 | 953.520 | 953.520 | 0 | −0.1 | 2221 | 449.1 | 449.1 | 449.1 | 6.94 |
| 1773 | R.FLNYQLR.D | | 477.264 | 2 | 953.520 | 953.520 | 0 | 0.5 | 2221 | 378.6 | 270.0 | 270.0 | 4.48 |
| 1773 | R.FLNYQLR.D | | 477.264 | 2 | 953.520 | 953.520 | 0 | −0.1 | 2221 | 350.5 | 239.1 | 239.1 | 5.02 |
| 1088 | K.HMVTMDGVREEDL | | 735.026 | 3 | 2203.063 | 2203.063 | 0 | 0.0 | 2277 | 564.2 | 564.2 | 564.2 | 9.77 |
| | APFSLR.K | | | | | | | | | | | | |
| 1088 | K.HMVTMDGVREEDL | | 1102.033 | 2 | 2203.058 | 2203.063 | 0 | 2.4 | 2277 | 458.5 | 458.5 | 458.5 | 5.66 |
| | APFSLR.K | | | | | | | | | | | | |
| 1883 | K.HMVTMDGVREEDL | | 583.545 | 1 | 2331.158 | 2331.158 | 0 | −0.1 | 2277 | 454.4 | 454.4 | 454.4 | 7.44 |
| | APFSLRK.R | | | | | | | | | | | | |
| 2226 | K.HMVTMDGVR.E | | 523.250 | 2 | 1045.492 | 45.492 | 0 | 0.1 | 2277 | 429.8 | 429.8 | 429.8 | 6.99 |
| 3135 | K.HM[+15.995]VT | | 740.690 | 3 | 2220.055 | 2219.058 | 1 | −3.0 | 2277 | 369.2 | 369.2 | 158.1 | 6.34 |
| | MDGVREEDLAPFSLR | | | | | | | | | | | | |
| | .KM[+16] | | | | | | | | | | | | |
| 1883 | K.HMVTMDGVREEDL | | 777.724 | 3 | 2331.157 | 2331.158 | 0 | −0.7 | 2277 | 353.9 | 353.9 | 353.9 | 3.27 |
| | APFSLRK.R | | | | | | | | | | | | |
| 1121 | R.EEDLAPFSLRK.R | | 435.566 | 3 | 1304.685 | 1304.685 | 0 | 0.1 | 2286 | 613.8 | 613.8 | 613.8 | 10.40 |
| 930 | R.EEDLAPFSLR.K | | 588.798 | 2 | 1176.590 | 1176.590 | 0 | 0.0 | 2286 | 517.5 | 333.7 | 333.7 | 6.53 |
| 930 | R.EEDLAPFSLR.K | | 588.799 | 2 | 1176.590 | 1176.590 | 0 | 0.1 | 2286 | 441.2 | 387.4 | 387.4 | 7.33 |
| 1186 | K.RWESEPHPYVFFN | | 826.732 | 6 | 4955.353 | 4955.364 | 0 | 2.1 | 2297 | 535.5 | 319.1 | 319.1 | 4.65 |
| | DDHTTMTFIGFHLQP | | | | | | | | | | | | |
| | NINGSVDAISHLTGK | | | | | | | | | | | | |
| | .V | | | | | | | | | | | | |
| 840 | R.WESEPHPYVFFND | | 960.658 | 5 | 4799.263 | 4799.262 | 0 | 0.1 | 2298 | 828.7 | 828.7 | 828.7 | 14.16 |
| | DHTTMTFIGFHLQPN | | | | | | | | | | | | |
| | INGSVDAISHLTGK. | | | | | | | | | | | | |
| | V | | | | | | | | | | | | |
| 840 | R.WESEPHPYVFFND | | 960.658 | 5 | 4799.259 | 4799.262 | 0 | −0.8 | 2298 | 659.9 | 470.3 | 470.3 | 9.48 |
| | DHTTMTFIGFHLQPN | | | | | | | | | | | | |
| | INGSVDAISHLTGK. | | | | | | | | | | | | |
| | V | | | | | | | | | | | | |
| 840 | R.WESEPHPYVFFND | | 800.714 | 6 | 4799.249 | 4799.262 | 0 | −2.9 | 2298 | 580.4 | 580.4 | 580.4 | 7.72 |
| | DHTTMTFIGFHLQPN | | | | | | | | | | | | |
| | INGSVDAISHLTGK. | | | | | | | | | | | | |
| | V | | | | | | | | | | | | |
| 1513 | R.WESEPHPYVFFND | | 800.882 | 6 | 4800.256 | 4800.246 | 0 | 1.9 | 2298 | 572.3 | 520.4 | 45.7 | 8.19 |
| | DHTTMTFIGFHLQPN | | | | | | | | | | | | |
| | IN[+0.984]GSVDA | | | | | | | | | | | | |
| | ISHLTGK.VN[+1] | | | | | | | | | | | | |
| 840 | R.WESEPHPYVFFND | | 800.885 | 6 | 4800.273 | 4799.262 | 1 | 1.5 | 2298 | 546.2 | 463.9 | 15.1 | 6.96 |
| | DHTTMTFIGFHLQPN | | | | | | | | | | | | |
| | INGSVDAISHLTGK. | | | | | | | | | | | | |
| | V | | | | | | | | | | | | |
| 840 | R.WESEPHPYVFFND | | 800.717 | 6 | 4799.265 | 4799.262 | 0 | 0.6 | 2298 | 462.7 | 462.7 | 462.7 | 6.89 |
| | DHTTMTFIGFHLQPN | | | | | | | | | | | | |
| | INGSVDAISHLTGK. | | | | | | | | | | | | |
| | V | | | | | | | | | | | | |
| 868 | R.DVMTRDLYQGLLL | | 607.661 | 3 | 1820.969 | 1820.969 | 0 | 0.0 | 2344 | 494.1 | 494.1 | 494.1 | 8.72 |
| | QR.V | | | | | | | | | | | | |
| 868 | R.DVMTRDLYQGLLL | | 607.661 | 3 | 1820.969 | 1820.969 | 0 | 0.0 | 2344 | 303.9 | 303.9 | 303.9 | 5.58 |
| | QR.V | | | | | | | | | | | | |
| 1068 | R.DLYQGLLLQRVPF | | 662.366 | 4 | 2646.442 | 2646.440 | 0 | 0.6 | 2349 | 652.5 | 652.5 | 1652.5 | 11.46 |
| | NVDFDKLPR.H | | | | | | | | | | | | |
| 1068 | R.DLYQGLLLQRVPF | | 662.366 | 4 | 2646.442 | 2646.440 | 10 | 0.5 | 2349 | 600.3 | 600.3 | 600.3 | 10.46 |
| | NVDFDKLPR.H | | | | | | | | | | | | |
| 1068 | R.DLYQGLLLQRVPF | | 882.819 | 3 | 2646.442 | 2646.440 | 0 | 0.8 | 2349 | 582.8 | 582.8 | 582.8 | 9.46 |
| | NVDFDKLPR.H | | | | | | | | | | | | |
| 984 | R.DLYQGLLLQR.V | | 609.846 | 2 | 1218.684 | 1218.684 | 0 | −0.3 | 2349 | 582.0 | 582.0 | 582.0 | 8.86 |
| 1068 | R.DLYQGLLLQRVPF | | 882.820 | 3 | 2646.445 | 2646.440 | 0 | 1.6 | 2349 | 568.7 | 568.7 | 568.7 | 8.73 |
| | NVDFDKLPR.H | | | | | | | | | | | | |
| 1068 | R.DLYQGLLLQRVPF | | 662.366 | 4 | 2646.441 | 2646.440 | 0 | 0.4 | 2349 | 566.1 | 566.1 | 566.1 | 9.46 |
| | NVDFDKLPR.H | | | | | | | | | | | | |
| 1068 | R.DLYQGLLLQRVPF | | 530.094 | 5 | 2646.440 | 2646.440 | 0 | −0.3 | 2349 | 548.7 | 548.7 | 548.7 | 8.03 |
| | NVDFDKLPR.H | | | | | | | | | | | | |
| 984 | R.DLYQGLLLQR.V | | 406.900 | 3 | 1218.684 | 1218.684 | 0 | 0.0 | 2349 | 537.6 | 537.6 | 537.6 | 8.16 |
| 984 | R.DLYQGLLLQR.V | | 609.846 | 2 | 1218.684 | 1218.684 | 0 | −0.2 | 2349 | 459.6 | 459.6 | 459.6 | 7.33 |
| 1068 | R.DLYQGLLLQRVPF | | 882.818 | 3 | 2646.441 | 2646.440 | 0 | 0.2 | 2349 | 448.1 | 448.1 | 448.1 | 6.97 |
| | NVDFDKLPR.H | | | | | | | | | | | | |
| 841 | R.VPFNVDFDKLPR. | | 482.930 | 3 | 1446.774 | 1446.774 | 0 | 0.0 | 2359 | 651.5 | 651.5 | 651.5 | 11.40 |
| | H | | | | | | | | | | | | |
| 841 | R.VPFNVDFDKLPR. | | 482.929 | 3 | 1446.774 | 1446.774 | 0 | −0.1 | 2359 | 627.5 | 627.5 | 627.5 | 10.40 |
| | H | | | | | | | | | | | | |
| 841 | R.VPFNVDFDKLPR. | | 723.891 | 2 | 1446.774 | 1446.774 | 0 | 0.1 | 2359 | 543.7 | 543.7 | 543.7 | 8.56 |
| | H | | | | | | | | | | | | |
| 841 | R.VPFNVDFDKLPR. | | 482.930 | 3 | 1446.774 | 1446.774 | 0 | 0.2 | 2359 | 486.7 | 486.7 | 486.7 | 18.35 |
| | H | | | | | | | | | | | | |
| 841 | R.VPFNVDFDKLPR. | | 482.930 | 3 | 1446.774 | 1446.774 | 0 | −0.1 | 2359 | 321.8 | 321.8 | 321.8 | 5.29 |
| | H | | | | | | | | | | | | |
| 841 | R.VPFNVDFDKLPR. | | 723.891 | 2 | 1446.774 | 1446.774 | 0 | 0.1 | 2359 | 304.5 | 304.5 | 304.5 | 5.21 |
| | H | | | | | | | | | | | | |
| 1748 | R.LC[+57.021]LT | C[+57] | 984.496 | 3 | 2951.475 | 2951.474 | 0 | 0.2 | 2377 | 543.6 | 543.6 | 543.6 | 18.55 |
| | LGIPQATDPDKTYEL | | | | | | | | | | | | |
| | TTDNMLK.I | | | | | | | | | | | | |
| 1798 | K.ILAIEMR.F | | 423.249 | 2 | 845.491 | 845.491 | 0 | 0.0 | 2403 | 458.5 | 334.3 | 334.3 | 5.81 |
| 1798 | K.ILAIEMR.F | | 423.249 | 2 | 845.491 | 845.491 | 0 | 0.0 | 2403 | 395.4 | 395.4 | 395.4 | 6.72 |
| 1798 | K.ILAIEMR.F | | 845.491 | 1 | 845.491 | 845.491 | 0 | −0.7 | 2403 | 387.6 | 387.6 | 387.6 | 6.01 |
| 3975 | R.LIKFLSDLRR.G | | 420.931 | 3 | 1260.778 | 1260.779 | 0 | −0.2 | 2429 | 435.5 | 435.5 | 435.5 | 6.96 |
| 3975 | R.LIKFLSDLRR.G | | 420.931 | 3 | 1260.779 | 1260.779 | 0 | 0.1 | 2429 | 380.8 | 380.8 | 380.8 | 6.37 |
| 1781 | K.FLSDLRR.G | | 453.761 | 2 | 906.515 | 906.516 | 0 | −0.3 | 2432 | 330.7 | 227.7 | 227.7 | 4.75 |
| 1781 | K.FLSDLRR.G | | 453.761 | 2 | 906.516 | 906.516 | 0 | 0.1 | 2432 | 324.3 | 177.1 | 177.1 | 4.42 |
| 1781 | K.FLSDLRR.G | | 453.761 | 2 | 906.516 | 906.516 | 0 | 0.0 | 2432 | 316.5 | 164.2 | 164.2 | 4.48 |
| 1506 | R.GGTN[+0.984]A | N[+1] | 406.563 | 3 | 1217.674 | 1217.674 | 0 | 0.4 | 2439 | 504.8 | 464.5 | 464.5 | 7.62 |
| | DTIKLVK.V | | | | | | | | | | | | |
| 866 | K.VHGGTTADMIYSR | | 704.338 | 2 | 1407.668 | 1407.669 | 0 | 0.3 | 2451 | 752.8 | 752.8 | 752.8 | 12.88 |
| | .V | | | | | | | | | | | | |
| 1538 | K.VHGGTTADM | M[+16] | 712.336 | 2 | 1423.665 | 1423.663 | 0 | 0.9 | 2451 | 597.7 | 597.7 | 597.7 | 9.59 |
| | [+15.995] | | | | | | | | | | | | |
| | IYSR.V | | | | | | | | | | | | |
| 1538 | K.VHGGTTADM | M[+16] | 475.226 | 3 | 1423.664 | 1423.663 | 0 | 0.2 | 2451 | 518.7 | 518.7 | 518.7 | 7.81 |
| | [+15.995] | | | | | | | | | | | | |
| | IYSR.V | | | | | | | | | | | | |
| 866 | K.VHGGTTADMIYSR | | 469.894 | 3 | 1407.669 | 1407.669 | 0 | 0.0 | 2451 | 516.0 | 516.0 | 516.0 | 7.81 |
| | .V | | | | | | | | | | | | |
| 1538 | K.VHGGTTADM | M[+16] | 475.226 | 3 | 1423.663 | 1423.663 | 0 | 0.0 | 2451 | 500.1 | 500.1 | 500.1 | 7.81 |
| | [+15.995] | | | | | | | | | | | | |
| | IYSR.V | | | | | | | | | | | | |
| 866 | K.VHGGTTADMIYSR | | 469.894 | 3 | 1407.669 | 1407.669 | 0 | 0.0 | 2451 | 477.2 | 477.2 | 477.2 | 7.57 |
| | .V | | | | | | | | | | | | |
| 1538 | K.VHGGTTADM | M[+16] | 475.226 | 3 | 1423.663 | 1423.663 | 0 | 0.0 | 2451 | 476.2 | 476.2 | 476.2 | 7.57 |
| | [+15.995] | | | | | | | | | | | | |
| | IYSR.V | | | | | | | | | | | | |
| 1538 | K.VHGGTTADM | M[+16] | 475.226 | 3 | 1423.664 | 1423.663 | 0 | 0.4 | 2451 | 473.9 | 473.9 | 473.9 | 7.57 |
| | [+15.995] | | | | | | | | | | | | |
| | IYSR.V | | | | | | | | | | | | |
| 866 | K.VHGGTTADMIYSR | | 469.894 | 3 | 1407.668 | 1407.669 | 0 | 0.2 | 2451 | 473.5 | 1473.5 | 473.5 | 8.30 |
| | .V | | | | | | | | | | | | |
| 866 | K.VHGGTTADMIYSR | | 469.894 | 3 | 1407.668 | 1407.669 | 0 | −0.3 | 2451 | 448.8 | 448.8 | 448.8 | 6.86 |
| | .V | | | | | | | | | | | | |
| 866 | K.VHGGTTADMIYSR | | 704.338 | 2 | 1407.668 | 1407.669 | 0 | −0.2 | 2451 | 436.2 | 436.2 | 436.2 | 8.19 |
| | .V | | | | | | | | | | | | |
| 866 | K.VHGGTTADMIYSR | | 469.894 | 3 | 1407.668 | 1407.669 | 0 | 0.1 | 2451 | 416.6 | 416.6 | 416.6 | 7.22 |
| | .V | | | | | | | | | | | | |
| 866 | K.VHGGTTADMIYSR | | 469.894 | 3 | 1407.667 | 1407.669 | 0 | 0.8 | 2451 | 375.5 | 375.5 | 375.5 | 6.16 |
| | .V | | | | | | | | | | | | |
| 866 | K.VHGGTTADMIYSR | | 469.894 | 3 | 1407.668 | 1407.669 | 0 | −0.2 | 2451 | 365.0 | 365.0 | 365.0 | 7.10 |
| | .V | | | | | | | | | | | | |
| 866 | K.VHGGTTADMIYSR | | 704.334 | 2 | 1407.661 | 1407.669 | 0 | −5.7 | 2451 | 356.1 | 356.1 | 356.1 | 4.01 |
| | .V | | | | | | | | | | | | |
| 866 | K.VHGGTTADMIYSR | | 469.894 | 3 | 1407.668 | 1407.669 | 0 | −0.2 | 2451 | 326.0 | 326.0 | 326.0 | 15.48 |
| | .V | | | | | | | | | | | | |
| 866 | K.VHGGTTADMIYSR | | 469.894 | 3 | 1407.668 | 1407.669 | 0 | −0.3 | 2451 | 316.0 | 316.0 | 316.0 | 4.28 |
| | .V | | | | | | | | | | | | |
| 866 | K.VHGGTTADMIYSR | | 704.338 | 2 | 1407.668 | 1407.669 | 0 | −0.1 | 2451 | 304.8 | 304.8 | 304.8 | 15.63 |
| | .V | | | | | | | | | | | | |
| 1926 | R.VREAENVAFANK. | | 449.906 | 3 | 1347.702 | 1347.702 | 0 | 0.2 | 2464 | 414.4 | 414.1 | 414.1 | 6.80 |
| | D | | | | | | | | | | | | |
| 1926 | R.VREAENVAFANK. | | 674.354 | 2 | 1347.701 | 1347.702 | 0 | 0.4 | 2464 | 354.4 | 354.4 | 354.4 | 4.43 |
| | D | | | | | | | | | | | | |
| 1926 | R.VREAENVAFANK. | | 449.905 | 3 | 1347.702 | 1347.702 | 0 | −0.1 | 2464 | 324.5 | 324.5 | 324.5 | 15.29 |
| | D | | | | | | | | | | | | |
| 3318 | K.HSEEMIC | C[+57] | 669.985 | 3 | 2007.939 | 2007.938 | 0 | 0.7 | 2530 | 394.3 | 394.3 | 394.3 | 17.28 |
| | [+57.021]R | | | | | | | | | | | | |
| | LESAGLGYR.V | | | | | | | | | | | | |
| 890 | R.LESAGLGYR.V | | 483.256 | 2 | 965.505 | 965.505 | 0 | 0.1 | 2538 | 588.5 | 588.5 | 588.5 | 8.62 |
| 890 | R.LESAGLGYR.V | | 483.256 | 2 | 965.505 | 965.505 | 0 | 0.1 | 2538 | 548.4 | 548.4 | 548.4 | 7.78 |
| 890 | R.LESAGLGYR.V | | 483.256 | 2 | 965.505 | 965.505 | 0 | −0.4 | 2538 | 521.3 | 521.3 | 521.3 | 7.07 |
| 890 | R.LESAGLGYR.V | | 483.256 | 2 | 965.505 | 965.505 | 0 | −0.1 | 2538 | 509.9 | 509.9 | 509.9 | 7.81 |
| 890 | R.LESAGLGYR.V | | 483.256 | 2 | 965.505 | 965.505 | 0 | −0.3 | 2538 | 474.1 | 380.9 | 380.9 | 7.10 |
| 890 | R.LESAGLGYR.V | | 483.256 | 2 | 965.505 | 965.505 | 0 | 0.3 | 2538 | 389.1 | 389.1 | 389.1 | 6.72 |
| 890 | R.LESAGLGYR.V | | 483.256 | 2 | 965.505 | 965.505 | 0 | 0.0 | 2538 | 330.3 | 330.3 | 330.3 | 5.33 |
| 1190 | R.VSMEETADRLG | | 591.977 | 3 | 1773.917 | 1773.916 | 0 | 0.2 | 2547 | 634.2 | 634.2 | 634.2 | 10.77 |
| | SIPLR.Q | | | | | | | | | | | | |
| 1587 | R.VSM[+15.995]E | M[+16] | 597.308 | 3 | 1789.910 | 1789.911 | 0 | −0.5 | 2547 | 476.8 | 476.8 | 476.8 | 6.80 |
| | ETADRLGSIPLR.Q | | | | | | | | | | | | |
| 1587 | R.VSM[+15.995]E | M[+16] | 597.308 | 3 | 1789.910 | 1789.911 | 0 | −0.5 | 2547 | 475.4 | 475.4 | 475.4 | 16.80 |
| | ETADRLGSIPLR.Q | | | | | | | | | | | | |
| 1190 | R.VSMEETADRLGSI | | 591.977 | 3 | 1773.917 | 1773.916 | 0 | 0.2 | 2547 | 449.0 | 449.0 | 449.0 | 7.75 |
| | PLR.Q | | | | | | | | | | | | |
| 1587 | R.VSM[+15.995]E | M[+16] | 597.309 | 3 | 1789.912 | 1789.911 | 0 | 0.3 | 2547 | 440.6 | 440.6 | 440.6 | 7.28 |
| | ETADRLGSIPLR.Q | | | | | | | | | | | | |
| 1190 | R.VSMEETADRLGSI | | 591.977 | 3 | 1773.917 | 1773.916 | 0 | 0.2 | 2547 | 420.9 | 420.9 | 420.9 | 7.64 |
| | PLR.Q | | | | | | | | | | | | |
| 1190 | R.VSMEETADRLGSI | | 591.977 | 3 | 1773.916 | 1773.916 | 0 | 0.0 | 2547 | 416.2 | 416.2 | 416.2 | 7.64 |
| | PLR.Q | | | | | | | | | | | | |
| 1190 | R.VSMEETADRLGSI | | 887.462 | 2 | 1773.916 | 1773.916 | 0 | 0.0 | 2547 | 314.2 | 314.2 | 314.2 | 15.42 |
| | PLR.Q | | | | | | | | | | | | |
| 1587 | R.VSM[+15.995]E | M[+16] | 895.458 | 2 | 1789.910 | 1789.911 | 0 | −1.0 | 2547 | 306.8 | 306.8 | 306.8 | 14.87 |
| | ETADRLGSIPLR.Q | | | | | | | | | | | | |
| 1234 | R.VHALPPSLIPLVW | | 944.026 | 4 | 3773.082 | 3773.079 | 0 | 0.9 | 2568 | 761.7 | 761.7 | 761.7 | 13.39 |
| | DFGQLSDVAEKLYIQ | | | | | | | | | | | | |
| | QIVQR.L | | | | | | | | | | | | |
| 1139 | R.VHALPPSLIPLVW | | 877.811 | 3 | 2631.420 | 2631.418 | 0 | 0.6 | 2568 | 697.7 | 697.7 | 697.7 | 11.96 |
| | DFGQLSDVAEK.L | | | | | | | | | | | | |
| 1139 | R.VHALPPSLIPLVW | | 877.812 | 3 | 2631.420 | 2631.418 | 0 | 0.8 | 2568 | 624.9 | 624.9 | 624.9 | 10.96 |
| | DFGQLSDVAEK.L | | | | | | | | | | | | |
| 1139 | R.VHALPPSLIPLVW | | 877.813 | 3 | 2631.423 | 2631.418 | 0 | 1.9 | 2568 | 594.1 | 594.1 | 594.1 | 9.96 |
| | DFGQLSDVAEK.L | | | | | | | | | | | | |
| 1234 | R.VHALPPSLIPLVW | | 944.025 | 4 | 3773.078 | 3773.079 | 0 | 0.2 | 2568 | 592.0 | 592.0 | 592.0 | 8.66 |
| | DFGQLSDVAEKLYIQ | | | | | | | | | | | | |
| | QIVQR.L | | | | | | | | | | | | |
| 981 | K.LYIQQIVQR.L | | 580.843 | 2 | 1160.678 | 1160.679 | 0 | −0.2 | 2592 | 352.0 | 352.0 | 352.0 | 5.48 |
| 2006 | R.LVESISLDENGTR | | 716.867 | 2 | 1432.726 | 1432.728 | 0 | −1.0 | 2601 | 624.8 | 586.7 | 1586.7 | 9.88 |
| | .V | | | | | | | | | | | | |
| 2006 | R.LVESISLDENGTR | | 478.248 | 3 | 1432.728 | 1432.728 | 0 | 0.2 | 2601 | 467.4 | 467.4 | 467.4 | 6.73 |
| | .V | | | | | | | | | | | | |
| 938 | R.FFPKPYDDSR.L | | 636.307 | 2 | 1271.606 | 1271.606 | 0 | 0.2 | 2710 | 525.0 | 525.0 | 525.0 | 7.78 |
| 883 | R.FFPKPYDDSRLLL | | 742.392 | 3 | 2225.161 | 2225.160 | 0 | 0.4 | 2710 | 475.6 | 475.6 | 475.6 | 8.48 |
| | DEITR.A | | | | | | | | | | | | |
| 883 | R.FFPKPYDDSRLLL | | 557.046 | 4 | 2225.160 | 2225.160 | 0 | 0.0 | 2710 | 378.5 | 378.5 | 378.5 | 7.53 |
| | DEITR.A | | | | | | | | | | | | |
| 938 | R.FFPKPYDDSR.L | | 424.540 | 3 | 1271.606 | 1271.606 | 0 | 0.5 | 2710 | 375.5 | 375.5 | 375.5 | 6.87 |
| 938 | R.FFPKPYDDSR.L | | 424.540 | 3 | 1271.606 | 1271.606 | 0 | 0.4 | 2710 | 374.4 | 374.4 | 374.4 | 6.72 |
| 938 | R.FFPKPYDDSR.L | | 424.540 | 3 | 1271.606 | 1271.606 | 0 | 0.1 | 2710 | 355.8 | 355.8 | 355.8 | 5.33 |
| 938 | R.FFPKPYDDSR.L | | 424.540 | 3 | 1271.606 | 1271.606 | 0 | 0.3 | 2710 | 338.4 | 338.4 | 338.4 | 5.33 |
| 938 | R.FFPKPYDDSR.L | | 424.540 | 3 | 1271.606 | 1271.606 | 0 | 0.2 | 2710 | 336.2 | 336.2 | 336.2 | 5.33 |
| 902 | R.LLLDEITRAQDLF | | 809.133 | 3 | 2425.383 | 2425.381 | 0 | 0.6 | 2720 | 669.6 | 669.6 | 669.6 | 11.46 |
| | LDGVPLRK.T | | | | | | | | | | | | |
| 1256 | R.LLLDEITRAQDLF | | 766.435 | 3 | 2297.290 | 2297.286 | 0 | 1.7 | 2720 | 644.8 | 644.8 | 644.8 | 10.77 |
| | LDGVPLR.K | | | | | | | | | | | | |
| 902 | R.LLLDEITRAQDLF | | 809.132 | 3 | 2425.383 | 2425.381 | 0 | 0.5 | 2720 | 595.3 | 595.3 | 595.3 | 9.46 |
| | LDGVPLRK.T | | | | | | | | | | | | |
| 902 | R.LLLDEITRAQDLF | | 607.101 | 4 | 2425.381 | 2425.381 | 0 | −0.2 | 2720 | 513.5 | 513.5 | 513.5 | 8.41 |
| | LDGVPLRK.T | | | | | | | | | | | | |
| 2028 | R.LLLDEITR.A | | 486.790 | 2 | 972.572 | 972.572 | 0 | 0.0 | 2720 | 476.6 | 476.6 | 476.6 | 7.33 |
| 902 | R.LLLDEITRAQDLF | | 809.132 | 3 | 2425.381 | 2425.381 | 0 | −0.3 | 2720 | 463.5 | 463.5 | 463.5 | 6.26 |
| | LDGVPLRK.T | | | | | | | | | | | | |
| 2028 | R.LLLDEITR.A | | 486.790 | 2 | 972.572 | 972.572 | 0 | −0.2 | 2720 | 428.1 | 428.1 | 428.1 | 6.99 |
| 902 | R.LLLDEITRAQDLF | | 485.882 | 5 | 2425.379 | 2425.381 | 0 | 0.9 | 2720 | 414.4 | 414.4 | 414.4 | 6.75 |
| | LDGVPLRK.T | | | | | | | | | | | | |
| 2028 | R.LLLDEITR.A | | 486.790 | 2 | 972.573 | 972.572 | 0 | 0.1 | 2720 | 406.8 | 406.8 | 406.8 | 7.22 |
| 902 | R.LLLDEITRAQDLF | | 607.101 | 4 | 2425.383 | 2425.381 | 0 | 0.5 | 2720 | 391.7 | 391.7 | 391.7 | 7.21 |
| | LDGVPLRK.T | | | | | | | | | | | | |
| 1256 | R.LLLDEITRAQDLF | | 575.077 | 4 | 2297.287 | 2297.286 | 0 | 0.1 | 2720 | 388.1 | 388.1 | 388.1 | 6.93 |
| | LDGVPLR.K | | | | | | | | | | | | |
| 902 | R.LLLDEITRAQDLF | | 809.132 | 3 | 2425.382 | 2425.381 | 0 | 0.2 | 2720 | 378.2 | 378.2 | 378.2 | 6.97 |
| | LDGVPLRK.T | | | | | | | | | | | | |
| 2028 | R.LLLDEITR.A | | 486.790 | 2 | 972.572 | 972.572 | 0 | −0.1 | 2720 | 364.4 | 364.4 | 364.4 | 6.72 |
| 1256 | R.LLLDEITRAQDLF | | 1149.149 | 2 | 2297.290 | 2297.286 | 0 | 1.6 | 2720 | 307.9 | 307.9 | 307.9 | 5.81 |
| | LDGVPLR.K | | | | | | | | | | | | |
| 922 | R.AQDLFLDGVPLRK | | 736.417 | 2 | 1471.827 | 1471.827 | 0 | 0.3 | 2728 | 665.6 | 665.6 | 665.6 | 11.40 |
| | .T | | | | | | | | | | | | |
| 1189 | R.AQDLFLDGVPLR. | | 672.370 | 2 | 1343.732 | 1343.732 | 0 | 0.2 | 2728 | 616.9 | 616.9 | 616.9 | 10.59 |
| | K | | | | | | | | | | | | |
| 922 | R.AQDLFLDGVPLRK | | 491.280 | 3 | 1471.827 | 1471.827 | 0 | 0.0 | 2728 | 606.4 | 606.4 | 606.4 | 10.40 |
| | .T | | | | | | | | | | | | |
| 922 | R.AQDLFLDGVPLRK | | 491.280 | 3 | 1471.827 | 1471.827 | 0 | 0.0 | 2728 | 587.9 | 587.9 | 587.9 | 9.40 |
| | .T | | | | | | | | | | | | |
| 922 | R.AQDLFLDGVPLRK | | 491.281 | 3 | 1471.827 | 1471.827 | 0 | 0.1 | 2728 | 553.3 | 553.3 | 1553.3 | 8.56 |
| | .T | | | | | | | | | | | | |
| 922 | R.AQDLFLDGVPLRK | | 491.281 | 3 | 1471.827 | 1471.827 | 0 | 0.1 | 2728 | 476.2 | 476.2 | 476.2 | 8.11 |
| | .T | | | | | | | | | | | | |
| 922 | R.AQDLFLDGVPLRK | | 491.280 | 3 | 1471.827 | 1471.827 | 0 | 0.1 | 2728 | 442.2 | 442.2 | 442.2 | 7.13 |
| | .T | | | | | | | | | | | | |
| 922 | R.AQDLFLDGVPLRK | | 491.280 | 3 | 1471.826 | 1471.827 | 0 | −0.4 | 2728 | 377.2 | 331.2 | 331.2 | 4.92 |
| | .T | | | | | | | | | | | | |
| 922 | R.AQDLFLDGVPLRK | | 491.280 | 3 | 1471.827 | 1471.827 | 0 | 0.0 | 2728 | 371.0 | 371.0 | 371.0 | 6.91 |
| | .T | | | | | | | | | | | | |
| 922 | R.AQDLFLDGVPLRK | | 491.281 | 3 | 1471.827 | 1471.827 | 0 | 0.1 | 2728 | 347.7 | 347.7 | 347.7 | 5.14 |
| | .T | | | | | | | | | | | | |
| 2639 | K.IPLFLVGKPGSSK | | 448.275 | 3 | 1342.809 | 1342.809 | 0 | −0.2 | 2763 | 344.2 | 344.2 | 344.2 | 5.48 |
| | .S | | | | | | | | | | | | |
| 850 | K.TIVADAMQGPAAY | | 963.475 | 2 | 1925.943 | 1925.943 | 0 | 0.1 | 2780 | 664.0 | 664.0 | 664.0 | 11.96 |
| | SDLFR.S | | | | | | | | | | | | |
| 850 | K.TIVADAMQGPAAY | | 963.475 | 2 | 1925.943 | 1925.943 | 0 | 0.0 | 2780 | 654.2 | 654.2 | 654.2 | 11.96 |
| | SDLFR.S | | | | | | | | | | | | |
| 850 | K.TIVADAMQGPAAY | | 963.476 | 2 | 1925.945 | 1925.943 | 0 | 1.4 | 2780 | 650.1 | 650.1 | 650.1 | 11.96 |
| | SDLFR.S | | | | | | | | | | | | |
| 850 | K.TIVADAMQGPAAY | | 642.653 | 3 | 1925.944 | 1925.943 | 0 | 0.9 | 2780 | 646.0 | 646.0 | 646.0 | 10.37 |
| | SDLFR.S | | | | | | | | | | | | |
| 850 | K.TIVADAMQGPAAY | | 963.475 | 2 | 1925.942 | 1925.943 | 0 | −0.1 | 2780 | 586.5 | 586.5 | 586.5 | 9.96 |
| | SDLFR.S | | | | | | | | | | | | |
| 850 | K.TIVADAMQGPAAY | | 642.654 | 3 | 1925.946 | 1925.943 | 0 | 1.9 | 2780 | 581.1 | 581.1 | 581.1 | 9.37 |
| | SDLFR.S | | | | | | | | | | | | |
| 850 | K.TIVADAMQGPAAY | | 642.653 | 3 | 1925.943 | 1925.943 | 0 | 0.3 | 2780 | 575.7 | 575.7 | 575.7 | 9.37 |
| | SDLFR.S | | | | | | | | | | | | |
| 1545 | K.TIVADAM | M[+16] | 971.472 | 2 | 1941.937 | 1941.938 | 0 | 0.1 | 2780 | 574.4 | 574.4 | 574.4 | 9.96 |
| | [+15.995] | | | | | | | | | | | | |
| | QGPAAYSDLFR. | | | | | | | | | | | | |
| | S | | | | | | | | | | | | |
| 850 | K.TIVADAMQGPAAY | | 963.475 | 2 | 1925.943 | 1925.943 | 0 | 0.1 | 2780 | 551.3 | 517.9 | 517.9 | 9.12 |
| | SDLFR.S | | | | | | | | | | | | |
| 850 | K.TIVADAMQGPAAY | | 963.474 | 2 | 1925.941 | 1925.943 | 0 | −0.6 | 2780 | 482.5 | 482.5 | 482.5 | 7.48 |
| | SDLFR.S | | | | | | | | | | | | |
| 850 | K.TIVADAMQGPAAY | | 642.653 | 3 | 1925.944 | 1925.943 | 0 | 0.9 | 2780 | 405.2 | 405.2 | 405.2 | 7.24 |
| | SDLFR.S | | | | | | | | | | | | |
| 850 | K.TIVADAMQGPAAY | | 642.652 | 3 | 1925.942 | 1925.943 | 0 | −0.2 | 2780 | 400.4 | 400.4 | 400.4 | 6.99 |
| | SDLFR.S | | | | | | | | | | | | |
| 850 | K.TIVADAMQGPAAY | | 963.475 | 2 | 1925.942 | 1925.943 | 0 | 0.2 | 2780 | 349.6 | 349.6 | 349.6 | 6.09 |
| | SDLFR.S | | | | | | | | | | | | |
| 1688 | R.SLKQVHLVSFQC | C[+57] | 739.388 | 4 | 2954.530 | 2954.531 | 0 | −0.2 | 2798 | 852.8 | 852.8 | 852.8 | 15.35 |
| | [+57.021] | | | | | | | | | | | | |
| | SPHSTPQ | | | | | | | | | | | | |
| | GIISTFR.Q | | | | | | | | | | | | |
| 1688 | R.SLKQVHLVSFQC | C[+57] | 739.388 | 4 | 2954.530 | 2954.531 | 0 | −0.2 | 2798 | 633.8 | 633.8 | 1633.8 | 10.39 |
| | [+57.021] | | | | | | | | | | | | |
| | SPHSTPQ | | | | | | | | | | | | |
| | GIISTFR.Q | | | | | | | | | | | | |
| 1688 | R.SLKQVHLVSFQC | C[+57] | 591.913 | 5 | 2955.535 | 2954.531 | 1 | 0.3 | 2798 | 441.8 | 441.8 | 441.8 | 7.36 |
| | [+57.021] | | | | | | | | | | | | |
| | SPHSTPQ | | | | | | | | | | | | |
| | GIISTFR.Q | | | | | | | | | | | | |
| 1688 | R.SLKQVHLVSFQC | C[+57] | 591.712 | 5 | 2954.529 | 2954.531 | 0 | −0.7 | 2798 | 325.8 | 325.8 | 325.8 | 4.57 |
| | [+57.021] | | | | | | | | | | | | |
| | SPHSTPQ | | | | | | | | | | | | |
| | GIISTFR.Q | | | | | | | | | | | | |
| 1700 | K.QVHLVSFQC | C[+57] | 657.335 | 4 | 2626.320 | 2626.320 | 0 | 0.1 | 2801 | 372.4 | 372.4 | 372.4 | 7.24 |
| | [+57.021] | | | | | | | | | | | | |
| | SPHSTPQGII | | | | | | | | | | | | |
| | STFR.Q | | | | | | | | | | | | |
| 1416 | R.FQQGKDLQQYVSV | | 1154.274 | 3 | 3460.808 | 3460.803 | 0 | 1.3 | 2828 | 801.2 | 801.2 | 801.2 | 14.07 |
| | VVLDEVGLAEDSPKM | | | | | | | | | | | | |
| | PLK.T | | | | | | | | | | | | |
| 1416 | R.FQQGKDLQQYVSV | | 865.957 | 4 | 3460.805 | 3460.803 | 0 | 0.5 | 2828 | 799.4 | 799.4 | 799.4 | 13.08 |
| | VVLDEVGLAEDSPKM | | | | | | | | | | | | |
| | PLK.T | | | | | | | | | | | | |
| 1416 | R.FQQGKDLQQYVSV | | 865.957 | 4 | 3460.806 | 3460.803 | 0 | 0.7 | 2828 | 792.6 | 792.6 | 792.6 | 13.08 |
| | VVLDEVGLAEDSPKM | | | | | | | | | | | | |
| | PLK.T | | | | | | | | | | | | |
| 961 | R.FQQGKDLQQYVSV | | 1496.269 | 2 | 2991.531 | 2991.531 | 0 | −0.1 | 2828 | 630.4 | 630.4 | 630.4 | 10.39 |
| | VVLDEVGLAEDSPK. | | | | | | | | | | | | |
| | M | | | | | | | | | | | | |
| 1617 | R.FQQGKDLQQYVSV | M[+16] | 869.955 | 4 | 3476.798 | 3476.798 | 0 | −0.1 | 2828 | 616.9 | 616.9 | 616.9 | 10.08 |
| | VVLDEVGLAEDSPKM | | | | | | | | | | | | |
| | [+15.995]PLK.T | | | | | | | | | | | | |
| 961 | R.FQQGKDLQQYVSV | | 997.850 | 3 | 2991.537 | 2991.531 | 0 | 1.9 | 2828 | 554.6 | 554.6 | 554.6 | 7.58 |
| | VVLDEVGLAEDSPK. | | | | | | | | | | | | |
| | M | | | | | | | | | | | | |
| 1617 | R.FQQGKDLQQYVSV | M[+16] | 869.955 | 4 | 3476.799 | 3476.798 | 0 | 0.2 | 2828 | 541.8 | 448.9 | 448.9 | 7.27 |
| | VVLDEVGLAEDSPKM | | | | | | | | | | | | |
| | [+15.995]PLK.T | | | | | | | | | | | | |
| 1617 | R.FQQGKDLQQYVSV | M[+16] | 869.955 | 4 | 3476.798 | 3476.798 | 0 | 0.1 | 2828 | 534.0 | 534.0 | 534.0 | 7.27 |
| | VVLDEVGLAEDSPKM | | | | | | | | | | | | |
| | [+15.995]PLK.T | | | | | | | | | | | | |
| 961 | R.FQQGKDLQQYVSV | | 997.850 | 3 | 2991.535 | 2991.531 | 0 | 1.2 | 2828 | 477.4 | 477.4 | 477.4 | 7.36 |
| | VVLDEVGLAEDSPK. | | | | | | | | | | | | |
| | M | | | | | | | | | | | | |
| 961 | R.FQQGKDLQQYVSV | | 748.639 | 4 | 2991.533 | 2991.531 | 0 | 0.6 | 2828 | 404.5 | 404.5 | 404.5 | 6.42 |
| | VVLDEVGLAEDSPK. | | | | | | | | | | | | |
| | M | | | | | | | | | | | | |
| 961 | R.FQQGKDLQQYVSV | | 748.639 | 4 | 2991.533 | 2991.531 | 0 | 0.7 | 2828 | 379.5 | 379.5 | 379.5 | 6.07 |
| | VVLDEVGLAEDSPK. | | | | | | | | | | | | |
| | M | | | | | | | | | | | | |
| 961 | R.FQQGKDLQQYVSV | | 748.638 | 4 | 2991.532 | 2991.531 | 0 | 0.2 | 2828 | 360.0 | 360.0 | 360.0 | 4.79 |
| | VVLDEVGLAEDSPK. | | | | | | | | | | | | |
| | M | | | | | | | | | | | | |
| 1171 | K.DLQQYVSVVVLDE | | 718.882 | 4 | 2872.505 | 2872.501 | 0 | 1.2 | 2833 | 859.8 | 859.8 | 859.8 | 14.78 |
| | VGLAEDSPKMPLK.T | | | | | | | | | | | | |
| 1171 | K.DLQQYVSVVVLDE | | 718.882 | 4 | 2872.505 | 2872.501 | 0 | 1.3 | 2833 | 749.6 | 749.6 | 749.6 | 11.79 |
| | VGLAEDSPKMPLK.T | | | | | | | | | | | | |
| 1171 | K.DLQQYVSVVVLDE | | 958.173 | 3 | 2872.504 | 2872.501 | 0 | 1.1 | 2833 | 694.9 | 694.9 | 694.9 | 11.39 |
| | VGLAEDSPKMPLK.T | | | | | | | | | | | | |
| 1171 | K.DLQQYVSVVVLDE | | 1436.758 | 2 | 2872.508 | 2872.501 | 0 | 2.5 | 2833 | 656.6 | 656.6 | 656.6 | 10.15 |
| | VGLAEDSPKMPLK.T | | | | | | | | | | | | |
| 932 | K.DLQQYVSVVVLDE | | 1202.120 | 2 | 2403.232 | 2403.229 | 0 | 1.2 | 2833 | 599.7 | 599.7 | 599.7 | 9.96 |
| | VGLAEDSPK.M | | | | | | | | | | | | |
| 932 | K.DLQQYVSVVVLDE | | 801.748 | 3 | 2403.231 | 2403.229 | 0 | 0.7 | 2833 | 487.0 | 487.0 | 487.0 | 8.32 |
| | VGLAEDSPK.M | | | | | | | | | | | | |
| 932 | K.DLQQYVSVVVLDE | | 801.749 | 3 | 2403.232 | 2403.229 | 0 | 1.1 | 2833 | 421.5 | 421.5 | 421.5 | 6.99 |
| | VGLAEDSPK.M | | | | | | | | | | | | |
| 1686 | K.MPLKTLHPLLEDG | C[+57] | 689.355 | 4 | 2754.397 | 2754.395 | 0 | 0.4 | 2855 | 788.6 | 788.6 | 788.6 | 12.08 |
| | C[+57.021]IEDDP | | | | | | | | | | | | |
| | APHKK.V | | | | | | | | | | | | |
| 1686 | K.MPLKTLHPLLEDG | C[+57] | 689.354 | 1 | 2754.396 | 2754.395 | 0 | 0.1 | 2855 | 745.3 | 745.3 | 745.3 | 11.08 |
| | C[+57.021]IEDDP | | | | | | | | | | | | |
| | APHKK.V | | | | | | | | | | | | |
| 1723 | K.TLHPLLEDGC | C[+57] | 572.036 | 4 | 2285.122 | 2285.123 | 0 | 0.4 | 2859 | 867.3 | 867.3 | 867.3 | 15.05 |
| | [+57.021] | | | | | | | | | | | | |
| | IEDDPAPHK | | | | | | | | | | | | |
| | K.V | | | | | | | | | | | | |
| 1723 | K.TLHPLLEDGC | C[+57] | 572.036 | 4 | 2285.122 | 2285.123 | 0 | −0.3 | 2859 | 866.1 | 866.1 | 866.1 | 15.05 |
| | [+57.021] | | | | | | | | | | | | |
| | IEDDPAPHK | | | | | | | | | | | | |
| | K.V | | | | | | | | | | | | |
| 1723 | K.TLHPLLEDGC | C[+57] | 762.380 | 3 | 2285.124 | 2285.123 | 0 | 0.6 | 2859 | 774.7 | 774.7 | 774.7 | 12.39 |
| | [+57.021] | | | | | | | | | | | | |
| | IEDDPAPHK | | | | | | | | | | | | |
| | K.V | | | | | | | | | | | | |
| 1723 | K.TLHPLLEDGC | C[+57] | 457.831 | 5 | 2285.124 | 2285.123 | 0 | 0.4 | 2859 | 660.2 | 660.2 | 660.2 | 11.77 |
| | [+57.021] | | | | | | | | | | | | |
| | IEDDPAPHK | | | | | | | | | | | | |
| | K.V | | | | | | | | | | | | |
| 1723 | K.TLHPLLEDGC | C[+57] | 457.831 | 5 | 2285.124 | 2285.123 | 0 | 0.4 | 2859 | 516.9 | 516.9 | 516.9 | 8.72 |
| | [+57.021] | | | | | | | | | | | | |
| | IEDDPAPHK | | | | | | | | | | | | |
| | K.V | | | | | | | | | | | | |
| 1723 | K.TLHPLLEDGC | C[+57] | 457.831 | 5 | 2285.124 | 2285.123 | 0 | 0.4 | 2859 | 497.9 | 497.9 | 497.9 | 7.99 |
| | [+57.021] | | | | | | | | | | | | |
| | IEDDPAPHK | | | | | | | | | | | | |
| | K.V | | | | | | | | | | | | |
| 1966 | K.KVGFVGISNWALD | | 567.982 | 3 | 1701.933 | 1701.932 | 0 | 0.2 | 2878 | 430.9 | 430.9 | 430.9 | 7.83 |
| | PAK.M | | | | | | | | | | | | |
| 1966 | K.KVGFVGISNWALD | | 851.469 | 2 | 1701.931 | 1701.932 | 0 | −0.6 | 2878 | 397.4 | 397.4 | 397.4 | 6.77 |
| | PAK.M | | | | | | | | | | | | |
| 4630 | K.KVGFVGISNWALD | M[+16] | 530.533 | 4 | 2119.110 | 2119.112 | 0 | −0.6 | 2878 | 332.0 | 332.0 | 332.0 | 4.80 |
| | PAKM[+15.995]NR | | | | | | | | | | | | |
| | .G | | | | | | | | | | | | |
| 1006 | K.VGFVGISNWALDP | | 659.347 | 3 | 1976.028 | 1975.022 | 1 | 1.2 | 2879 | 652.3 | 652.3 | 652.3 | 11.77 |
| | AKMNR.G | | | | | | | | | | | | |
| 836 | K.VGFVGISNWALDP | | 787.422 | 2 | 1573.836 | 1573.837 | 0 | 0.8 | 2879 | 648.0 | 648.0 | 648.0 | 10.26 |
| | AK.M | | | | | | | | | | | | |
| 836 | K.VGFVGISNWALDP | | 787.422 | 2 | 1573.838 | 1573.837 | 0 | 0.2 | 2879 | 645.3 | 645.3 | 1645.3 | 10.96 |
| | AK.M | | | | | | | | | | | | |
| 1006 | K.VGFVGISNWALDP | | 659.347 | 3 | 1976.025 | 1975.022 | 1 | −0.2 | 2879 | 640.5 | 640.5 | 398.4 | 10.77 |
| | AKMNR.G | | | | | | | | | | | | |
| 1006 | K.VGFVGISNWALDP | | 659.013 | 3 | 1975.025 | 1975.022 | 0 | 1.6 | 2879 | 628.0 | 628.0 | 628.0 | 10.77 |
| | AKMNR.G | | | | | | | | | | | | |
| 1006 | K.VGFVGISNWALDP | | 659.013 | 3 | 1975.024 | 1975.022 | 0 | 1.3 | 2879 | 618.6 | 618.6 | 618.6 | 10.77 |
| | AKMNR.G | | | | | | | | | | | | |
| 1006 | K.VGFVGISNWALDP | | 659.012 | 3 | 1975.022 | 1975.022 | 0 | 0.1 | 2879 | 600.9 | 600.9 | 600.9 | 10.77 |
| | AKMNR.G | | | | | | | | | | | | |
| 1006 | K.VGFVGISNWALDP | | 659.012 | 3 | 1975.022 | 1975.022 | 0 | 0.0 | 2879 | 591.3 | 586.8 | 1586.8 | 9.77 |
| | AKMNR.G | | | | | | | | | | | | |
| 1530 | K.VGFVGISNWALDP | M[+16] | 664.344 | 3 | 1991.018 | 1991.017 | 0 | 0.5 | 2879 | 567.2 | 567.2 | 567.2 | 9.77 |
| | AKM[+15.995]NR. | | | | | | | | | | | | |
| | G | | | | | | | | | | | | |
| 1006 | K.VGFVGISNWALDP | | 659.013 | 3 | 1975.024 | 1975.022 | 0 | 1.3 | 2879 | 553.2 | 553.2 | 553.2 | 8.93 |
| | AKMNR.G | | | | | | | | | | | | |
| 1486 | K.VGFVGISN | N[+1] | 787.915 | 2 | 1574.822 | 1574.821 | 0 | 0.4 | 2879 | 533.2 | 533.2 | 533.2 | 9.12 |
| | [+0.984] | | | | | | | | | | | | |
| | WALDPAK.M | | | | | | | | | | | | |
| 836 | K.VGFVGISNWALDP | | 525.284 | 3 | 1573.838 | 1573.837 | 0 | 0.2 | 2879 | 510.8 | 510.8 | 510.8 | 7.59 |
| | AK.M | | | | | | | | | | | | |
| 1530 | K.VGFVGISNWALDP | M[+16] | 664.344 | 3 | 1991.018 | 1991.017 | 0 | 0.5 | 2879 | 504.3 | 504.3 | 504.3 | 8.72 |
| | AKM[+15.995]NR. | | | | | | | | | | | | |
| | G | | | | | | | | | | | | |
| 1006 | K.VGFVGISNWALDP | | 659.013 | 3 | 1975.025 | 1975.022 | 0 | 1.4 | 2879 | 493.1 | 489.8 | 489.8 | 7.99 |
| | AKMNR.G | | | | | | | | | | | | |
| 836 | K.VGFVGISNWALDP | | 787.422 | 2 | 1573.837 | 1573.837 | 0 | 0.2 | 2879 | 491.7 | 491.7 | 491.7 | 8.91 |
| | AK.M | | | | | | | | | | | | |
| 836 | K.VGFVGISNWALDP | | 787.421 | 2 | 1573.835 | 1573.837 | 0 | −1.3 | 2879 | 479.2 | 479.2 | 479.2 | 17.96 |
| | AK.M | | | | | | | | | | | | |
| 836 | K.VGFVGISNWALDP | | 787.422 | 2 | 1573.837 | 1573.837 | 0 | −0.5 | 2879 | 460.2 | 460.2 | 460.2 | 7.96 |
| | AK.M | | | | | | | | | | | | |
| 1530 | K.VGFVGISNWALDP | M[+16] | 996.011 | 2 | 1991.015 | 1991.017 | 0 | −0.7 | 2879 | 452.1 | 452.1 | 452.1 | 7.77 |
| | AKM[+15.995]NR. | | | | | | | | | | | | |
| | G | | | | | | | | | | | | |
| 1530 | K.VGFVGISNWALDP | M[+16] | 996.013 | 2 | 1991.018 | 1991.017 | 0 | 0.8 | 2879 | 419.4 | 419.4 | 419.4 | 8.37 |
| | AKM[+15.995]NR. | | | | | | | | | | | | |
| | G | | | | | | | | | | | | |
| 1105 | R.GIFVSRGSPNETE | | 678.688 | 3 | 2034.050 | 2034.050 | 0 | 0.1 | 2897 | 587.3 | 587.3 | 587.3 | 9.77 |
| | LIESAK.G | | | | | | | | | | | | |
| 1105 | R.GIFVSRGSPNETE | | 678.688 | 3 | 2034.050 | 2034.050 | 0 | 0.0 | 2897 | 559.1 | 533.7 | 533.7 | 18.93 |
| | LIESAK.G | | | | | | | | | | | | |
| 990 | R.GSPNETELIESAK | | 687.841 | 2 | 1374.674 | 1374.675 | 0 | 0.3 | 2903 | 675.8 | 675.8 | 675.8 | 10.88 |
| | .G | | | | | | | | | | | | |
| 990 | R.GSPNETELIESAK | | 687.841 | 2 | 1374.675 | 1374.675 | 0 | 0.1 | 2903 | 668.0 | 668.0 | 668.0 | 11.59 |
| | .G | | | | | | | | | | | | |
| 990 | R.GSPNETELIESAK | | 458.896 | 3 | 1374.675 | 1374.675 | 0 | 0.0 | 2903 | 544.0 | 544.0 | 544.0 | 7.43 |
| | .G | | | | | | | | | | | | |
| 990 | R.GSPNETELIESAK | | 458.896 | 3 | 1374.675 | 1374.675 | 0 | 0.0 | 2903 | 441.9 | 441.9 | 441.9 | 6.73 |
| | .G | | | | | | | | | | | | |
| 990 | R.GSPNETELIESAK | | 458.896 | 3 | 1374.675 | 1374.675 | 0 | 0.0 | 2903 | 338.5 | 338.5 | 338.5 | 4.73 |
| | .G | | | | | | | | | | | | |
| 3340 | K.GIC[+57.021]S | C[+57] | 681.838 | 2 | 1362.668 | 1362.668 | 0 | 0.3 | 2916 | 628.6 | 628.6 | 628.6 | 9.88 |
| | SDILVQDR.V | | | | | | | | | | | | |
| 1862 | R.VQGYFASFAK.A | | 559.287 | 2 | 1117.568 | 1117.568 | 0 | 0.1 | 2928 | 453.1 | 453.1 | 453.1 | 7.33 |
| 877 | K.RQDKEFFGLR.D | | 432.567 | 3 | 1295.686 | 1295.686 | 0 | 0.3 | 2945 | 509.5 | 509.5 | 509.5 | 7.38 |
| 2123 | R.QDKEFFGLRDYYS | | 674.683 | 3 | 2022.034 | 2022.033 | 0 | 0.2 | 2946 | 395.2 | 395.2 | 395.2 | 6.74 |
| | LIK.M | | | | | | | | | | | | |
| 2123 | R.QDKEFFGLRDYYS | | 506.264 | | 2022.033 | 2022.033 | 0 | 0.1 | 2946 | 338.2 | 338.2 | 338.2 | 5.58 |
| | LIK.M | | | | | | | | | | | | |
| 2041 | R.DYYSLIK.M | | 451.237 | 2 | 901.467 | 901.467 | 0 | −0.1 | 2955 | 375.7 | 375.7 | 375.7 | 6.72 |
| 1007 | K.ASNRKPSPQDIAQ | | 617.678 | 3 | 1851.020 | 1851.020 | 0 | 0.2 | 2969 | 559.0 | 559.0 | 559.0 | 8.93 |
| | AVLR.N | | | | | | | | | | | | |
| 1007 | K.ASNRKPSPQDIAQ | | 617.678 | 3 | 1851.019 | 1851.020 | 0 | 0.5 | 2969 | 449.6 | 449.6 | 449.6 | 6.80 |
| | AVLR.N | | | | | | | | | | | | |
| 839 | R.KPSPQDIAQAVLR | | 474.940 | 3 | 1422.806 | 1422.806 | 0 | 0.2 | 2973 | 482.5 | 482.5 | 482.5 | 7.81 |
| | .N | | | | | | | | | | | | |
| 839 | R.KPSPQDIAQAVLR | | 474.940 | 3 | 1422.806 | 1422.806 | 0 | 0.3 | 2973 | 413.1 | 413.1 | 413.1 | 6.75 |
| | .N | | | | | | | | | | | | |
| 839 | R.KPSPQDIAQAVLR | | 474.940 | 3 | 1422.806 | 1422.806 | 0 | 0.0 | 2973 | 373.3 | 373.3 | 373.3 | 6.87 |
| | .N | | | | | | | | | | | | |
| 839 | R.KPSPQDIAQAVLR | | 475.275 | 3 | 1423.810 | 1422.806 | 1 | 0.1 | 2973 | 371.2 | 371.2 | 371.2 | 5.38 |
| | .N | | | | | | | | | | | | |
| 815 | R.NFSGKDDIQALDI | | 1210.129 | 2 | 2419.251 | 2419.250 | 0 | 0.4 | 2986 | 629.9 | 572.0 | 572.0 | 10.77 |
| | FLANLPEAK.C | | | | | | | | | | | | |
| 815 | R.NFSGKDDIQALDI | | 1210.131 | 2 | 2419.254 | 2419.250 | 0 | 1.6 | 2986 | 587.1 | 587.1 | 587.1 | 9.77 |
| | FLANLPEAK.C | | | | | | | | | | | | |
| 1490 | R.N[+0.984]FSGK | N[+1] | 807.417 | 3 | 2420.236 | 2420.234 | 0 | 0.7 | 2986 | 533.9 | 533.9 | 322.5 | 8.20 |
| | DDIQALDIFLANLPE | | | | | | | | | | | | |
| | AK.C | | | | | | | | | | | | |
| 815 | R.NFSGKDDIQALDI | | 807.088 | 3 | 2419.250 | 2419.250 | 0 | 0.2 | 2986 | 489.0 | 489.0 | 489.0 | 8.72 |
| | FLANLPEAK.C | | | | | | | | | | | | |
| 1490 | R.N[+0.984]FSGK | N[+1] | 807.417 | 3 | 2420.236 | 2420.234 | 0 | 0.7 | 2986 | 468.4 | 468.4 | 232.7 | 7.51 |
| | DDIQALDIFLANLPE | | | | | | | | | | | | |
| | AK.C | | | | | | | | | | | | |
| 815 | R.NFSGKDDIQALDI | | 807.088 | 3 | 2419.251 | 2419.250 | 0 | 0.1 | 2986 | 461.7 | 461.7 | 461.7 | 7.75 |
| | FLANLPEAK.C | | | | | | | | | | | | |
| 815 | R.NFSGKDDIQALDI | | 1210.129 | 2 | 2419.250 | 2419.250 | 0 | −0.3 | 2986 | 444.7 | 444.7 | 444.7 | 8.48 |
| | FLANLPEAK.C | | | | | | | | | | | | |
| 815 | R.NFSGKDDIQALDI | | 807.088 | 3 | 2419.251 | 2419.250 | 0 | 0.1 | 2986 | 384.7 | 384.7 | 384.7 | 7.53 |
| | FLANLPEAK.C | | | | | | | | | | | | |
| 815 | R.NFSGKDDIQALDI | | 807.089 | 3 | 2419.251 | 2419.250 | 0 | 0.3 | 2986 | 362.5 | 266.1 | 266.1 | 5.53 |
| | FLANLPEAK.C | | | | | | | | | | | | |
| 815 | R.NFSGKDDIQALDI | | 807.088 | 3 | 2419.250 | 2419.250 | 0 | −0.2 | 2986 | 326.5 | 326.5 | 326.5 | 5.66 |
| | FLANLPEAK.C | | | | | | | | | | | | |
| 815 | R.NFSGKDDIQALDI | | 807.090 | 3 | 2419.256 | 2419.250 | 0 | 2.2 | 2986 | 326.2 | 326.2 | 326.2 | 5.89 |
| | FLANLPEAK.C | | | | | | | | | | | | |
| 815 | R.NFSGKDDIQALDI | | 605.568 | 4 | 2419.250 | 2419.250 | 0 | 0.4 | 2986 | 310.4 | 310.4 | 310.4 | 4.75 |
| | FLANLPEAK.C | | | | | | | | | | | | |
| 876 | K.DDIQALDIFLANL | | 629.336 | 3 | 1885.993 | 1885.991 | 0 | 1.1 | 2991 | 488.1 | 488.1 | 488.1 | 8.32 |
| | PEAK.C | | | | | | | | | | | | |
| 1717 | K.C[+57.021]SEE | C[+57] | 710.844 | | 1420.681 | 1420.681 | 0 | 0.1 | 3008 | 556.3 | 556.3 | 556.3 | 8.75 |
| | VSPMQLIK.Q | | | | | | | | | | | | |
| 1717 | K.C[+57.021]SEE | C[+57] | 710.844 | 2 | 1420.681 | 1420.681 | 0 | 0.0 | 3008 | 543.4 | 438.1 | 438.1 | 8.75 |
| | VSPMQLIK.Q | | | | | | | | | | | | |
| 1717 | K.C[+57.021]SEE | C[+57] | 474.232 | 3 | 1420.681 | 1420.681 | 0 | 0.4 | 3008 | 506.4 | 375.6 | 375.6 | 6.27 |
| | VSPMQLIK.Q | | | | | | | | | | | | |
| 1166 | K.QNIFGPSQKVPGG | | 758.365 | 3 | 2273.079 | 2273.079 | 0 | 0.2 | 3020 | 821.0 | 821.0 | 821.0 | 14.78 |
| | EQEDAESR.Y | | | | | | | | | | | | |
| 1166 | K.QNIFGPSQKVPGG | | 758.364 | 3 | 2273.078 | 2273.079 | 0 | −0.4 | 3020 | 763.6 | 763.6 | 763.6 | 13.06 |
| | EQEDAESR.Y | | | | | | | | | | | | |
| 940 | K.QNIFGPSQKVPGG | | 776.657 | 4 | 3103.605 | 3103.606 | 0 | 0.3 | 3020 | 691.6 | 691.6 | 691.6 | 10.37 |
| | EQEDAESRYLLVLTK | | | | | | | | | | | | |
| | .N | | | | | | | | | | | | |
| 940 | K.QNIFGPSQKVPGG | | 1035.207 | 3 | 3103.606 | 3103.606 | 0 | 0.0 | 3020 | 682.2 | 682.2 | 1682.2 | 11.08 |
| | EQEDAESRYLLVLTK | | | | | | | | | | | | |
| | .N | | | | | | | | | | | | |
| 940 | K.QNIFGPSQKVPGG | | 1035.208 | 3 | 3103.609 | 3103.606 | 0 | 1.0 | 3020 | 615.4 | 615.4 | 615.4 | 10.08 |
| | EQEDAESRYLLVLTK | | | | | | | | | | | | |
| | .N | | | | | | | | | | | | |
| 1166 | K.QNIFGPSQKVPGG | | 1137.044 | 2 | 2273.081 | 2273.079 | 0 | 0.5 | 3020 | 565.2 | 565.2 | 565.2 | 9.77 |
| | EQEDAESR.Y | | | | | | | | | | | | |
| 940 | K.QNIFGPSQKVPGG | | 776.657 | 4 | 3103.606 | 3103.606 | 0 | 0.1 | 3020 | 506.1 | 506.1 | 506.1 | 8.03 |
| | EQEDAESRYLLVLTK | | | | | | | | | | | | |
| | .N | | | | | | | | | | | | |
| 940 | K.QNIFGPSQKVPGG | | 776.657 | 4 | 3103.605 | 3103.606 | 0 | 0.3 | 3020 | 495.8 | 495.8 | 495.8 | 7.32 |
| | EQEDAESRYLLVLTK | | | | | | | | | | | | |
| | .N | | | | | | | | | | | | |
| 1950 | R.YLLVLTK.N | | 425.276 | 2 | 849.545 | 849.544 | 0 | 0.4 | 3041 | 387.6 | 387.6 | 387.6 | 6.54 |
| 1732 | K.NYVALQILQQTFF | C[+57] | 1127.806 | 4 | 4508.202 | 4508.187 | 0 | 3.4 | 3048 | 831.9 | 831.9 | 831.9 | 12.13 |
| | EGDQQPEIIFGSGFP | | | | | | | | | | | | |
| | KDQEYTQLC | | | | | | | | | | | | |
| | [+57.021]R.N | | | | | | | | | | | | |
| 957 | K.NYVALQILQQTFF | | 1105.564 | 3 | 3314.676 | 3314.673 | 0 | 0.9 | 3048 | 700.5 | 641.0 | 641.0 | 11.98 |
| | EGDQQPEIIFGSGFP | | | | | | | | | | | | |
| | K.D | | | | | | | | | | | | |
| 957 | K.NYVALQILQQTFF | | 829.425 | 4 | 3314.676 | 3314.673 | 0 | 0.8 | 3048 | 669.7 | 669.7 | 669.7 | 10.98 |
| | EGDQQPEIIFGSGFP | | | | | | | | | | | | |
| | K.D | | | | | | | | | | | | |
| 957 | K.NYVALQILQQTFF | | 1105.564 | 3 | 3314.677 | 3314.673 | 0 | 1.2 | 3048 | 459.9 | 459.9 | 459.9 | 16.33 |
| | EGDQQPEIIFGSGFP | | | | | | | | | | | | |
| | K.D | | | | | | | | | | | | |
| 4389 | K.HYLDINTVLEKWQ | | 596.321 | 3 | 1786.949 | 1786.949 | 0 | 0.0 | 3172 | 309.7 | 309.7 | 309.7 | 5.58 |
| | K.S | | | | | | | | | | | | |
| 4631 | R.QGPRALTEELHQK | | 502.939 | 3 | 1506.802 | 1506.802 | 0 | 0.2 | 3237 | 322.9 | 162.5 | 162.5 | 4.67 |
| | .V | | | | | | | | | | | | |
| 872 | R.ALTEELHQKVSEE | | 856.446 | 2 | 1711.885 | 1711.886 | 0 | 0.8 | 3241 | 826.4 | 826.4 | 826.4 | 12.68 |
| | AK.S | | | | | | | | | | | | |
| 872 | R.ALTEELHQKVSEE | | 856.446 | 2 | 1711.884 | 1711.886 | 0 | −1.0 | 3241 | 645.0 | 645.0 | 645.0 | 8.68 |
| | AK.S | | | | | | | | | | | | |
| 872 | R.ALTEELHQKVSEE | | 428.727 | 4 | 1711.886 | 1711.886 | 0 | −0.1 | 3241 | 540.2 | 540.2 | 540.2 | 8.93 |
| | AK.S | | | | | | | | | | | | |
| 872 | R.ALTEELHQKVSEE | | 428.976 | 4 | 1712.884 | 1711.886 | 1 | −3.3 | 3241 | 476.7 | 476.7 | 476.7 | 7.16 |
| | AK.S | | | | | | | | | | | | |
| 872 | R.ALTEELHQKVSEE | | 428.727 | 4 | 1711.886 | 1711.886 | 0 | −0.1 | 3241 | 437.4 | 320.0 | 320.0 | 5.97 |
| | AK.S | | | | | | | | | | | | |
| 1695 | K.SILLNC | C[+57] | 764.911 | 2 | 1528.816 | 1528.815 | 0 | 0.2 | 3256 | 666.9 | 618.0 | 618.0 | 11.96 |
| | [+57.021] | | | | | | | | | | | | |
| | ATPDAVVR.L | | | | | | | | | | | | |
| 1173 | R.LSAYSLGGFAAEW | | 811.395 | 3 | 2432.169 | 2432.167 | 0 | 0.8 | 3270 | 933.6 | 933.6 | 933.6 | 30.00 |
| | LSQEYFHR.Q | | | | | | | | | | | | |
| 1173 | R.LSAYSLGGFAAEW | | 811.395 | 3 | 2432.169 | 2432.167 | 0 | 0.9 | 3270 | 891.3 | 891.3 | 891.3 | 15.95 |
| | LSQEYFHR.Q | | | | | | | | | | | | |
| 1173 | R.LSAYSLGGFAAEW | | 608.798 | 4 | 2432.168 | 2432.167 | 0 | 0.5 | 3270 | 787.2 | 787.2 | 1787.2 | 13.37 |
| | LSQEYFHR.Q | | | | | | | | | | | | |
| 1173 | R.LSAYSLGGFAAEW | | 811.395 | 3 | 2432.172 | 2432.167 | 0 | 1.9 | 3270 | 751.6 | 681.3 | 681.3 | 13.96 |
| | LSQEYFHR.Q | | | | | | | | | | | | |
| 1173 | R.LSAYSLGGFAAEW | | 811.395 | 3 | 2432.169 | 2432.167 | 0 | 1.0 | 3270 | 627.2 | 627.2 | 627.2 | 10.96 |
| | LSQEYFHR.Q | | | | | | | | | | | | |
| 1173 | R.LSAYSLGGFAAEW | | 1216.588 | 2 | 2432.169 | 2432.167 | 0 | 1.0 | 3270 | 614.3 | 614.3 | 614.3 | 10.96 |
| | LSQEYFHR.Q | | | | | | | | | | | | |
| 1005 | R.QRHNSFADFLQAH | | 627.314 | 4 | 2506.234 | 2506.233 | 0 | 0.2 | 3291 | 676.1 | 676.1 | 676.1 | 10.39 |
| | LHTADLER.H | | | | | | | | | | | | |
| 1005 | R.QRHNSFADFLQAH | | 627.314 | 4 | 2506.234 | 2506.233 | 0 | 0.2 | 3291 | 616.4 | 616.4 | 616.4 | 8.66 |
| | LHTADLER.H | | | | | | | | | | | | |
| 1005 | R.QRHNSFADFLQAH | | 502.053 | 5 | 2506.234 | 2506.233 | 0 | 0.2 | 3291 | 553.3 | 553.3 | 553.3 | 8.93 |
| | LHTADLER.H | | | | | | | | | | | | |
| 1005 | R.QRHNSFADFLQAH | | 836.083 | 3 | 2506.235 | 2506.233 | 0 | 0.7 | 3291 | 538.2 | 538.2 | 538.2 | 6.82 |
| | LHTADLER.H | | | | | | | | | | | | |
| 1005 | R.QRHNSFADFLQAH | | 836.083 | 3 | 2506.233 | 2506.233 | 0 | 0.1 | 3291 | 513.8 | 513.8 | 513.8 | 6.61 |
| | LHTADLER.H | | | | | | | | | | | | |
| 1005 | R.QRHNSFADFLQAH | | 418.545 | 6 | 2506.234 | 2506.233 | 0 | 0.3 | 3291 | 426.6 | 426.6 | 426.6 | 8.37 |
| | LHTADLER.H | | | | | | | | | | | | |
| 854 | R.HNSFADFLQAHLH | | 556.274 | 4 | 2222.074 | 2222.074 | 0 | 0.2 | 3293 | 796.5 | 796.5 | 796.5 | 13.96 |
| | TADLER.H | | | | | | | | | | | | |
| 854 | R.HNSFADFLQAHLH | | 556.274 | 4 | 2222.074 | 2222.074 | 0 | −0.1 | 3293 | 724.6 | 724.6 | 724.6 | 12.96 |
| | TADLER.H | | | | | | | | | | | | |
| 854 | R.HNSFADFLQAHLH | | 445.221 | 5 | 2222.075 | 2222.074 | 0 | 0.3 | 3293 | 565.9 | 565.9 | 565.9 | 9.96 |
| | TADLER.H | | | | | | | | | | | | |
| 854 | R.HNSFADFLQAHLH | | 445.221 | 5 | 2222.075 | 2222.074 | 0 | 0.4 | 3293 | 473.2 | 473.2 | 473.2 | 8.67 |
| | TADLER.H | | | | | | | | | | | | |
| 854 | R.HNSFADFLQAHLH | | 1111.541 | 2 | 2222.074 | 2222.074 | 0 | 0.1 | 3293 | 416.3 | 416.3 | 416.3 | 6.45 |
| | TADLER.H | | | | | | | | | | | | |
| 943 | R.HAIFTEITTFSR. | | 711.873 | 2 | 1422.738 | 1422.738 | 0 | 0.4 | 3312 | 548.3 | 548.3 | 548.3 | 8.75 |
| | L | | | | | | | | | | | | |
| 943 | R.HAIFTEITTFSR. | | 711.873 | 2 | 1422.738 | 1422.738 | 0 | 0.3 | 3312 | 483.7 | 483.7 | 483.7 | 7.81 |
| | L | | | | | | | | | | | | |
| 943 | R.HAIFTEITTFSR. | | 474.917 | 3 | 1422.738 | 1422.738 | 0 | 0.0 | 3312 | 427.7 | 427.7 | 427.7 | 7.46 |
| | L | | | | | | | | | | | | |
| 943 | R.HAIFTEITTFSR. | | 474.917 | 3 | 1422.737 | 1422.738 | 0 | −0.4 | 3312 | 413.9 | 413.9 | 413.9 | 6.51 |
| | L | | | | | | | | | | | | |
| 943 | R.HAIFTEITTFSR. | | 474.917 | 3 | 1422.737 | 1422.738 | 0 | 0.1 | 3312 | 402.2 | 402.2 | 402.2 | 7.46 |
| | L | | | | | | | | | | | | |
| 943 | R.HAIFTEITTFSR. | | 474.917 | 3 | 1422.737 | 1422.738 | 0 | 0.1 | 3312 | 319.6 | 319.6 | 319.6 | 5.40 |
| | L | | | | | | | | | | | | |
| 1143 | R.APKPTLLWLQQFD | | 703.129 | 1 | 2809.493 | 2809.492 | 0 | 0.4 | 3341 | 668.3 | 668.3 | 668.3 | 11.77 |
| | TEYSFLKEVR.N | | | | | | | | | | | | |
| 1143 | R.APKPTLLWLQQFD | | 937.169 | 3 | 2809.491 | 2809.492 | 0 | 0.4 | 3341 | 642.2 | 642.2 | 642.2 | 10.06 |
| | TEYSFLKEVR.N | | | | | | | | | | | | |
| 1143 | R.APKPTLLWLQQFD | | 937.503 | 3 | 2810.494 | 2809.492 | 1 | −0.5 | 3341 | 577.5 | 577.5 | 577.5 | 9.06 |
| | TEYSFLKEVR.N | | | | | | | | | | | | |
| 894 | R.APKPTLLWLQQFD | | 809.099 | 3 | 2425.281 | 2425.280 | 0 | 0.5 | 3341 | 475.4 | 475.4 | 475.4 | 7.70 |
| | TEYSFLK.E | | | | | | | | | | | | |
| 894 | R.APKPTLLWLQQFD | | 809.099 | 3 | 2425.281 | 2425.280 | 0 | 0.5 | 3341 | 333.3 | 333.3 | 333.3 | 5.86 |
| | TEYSFLK.E | | | | | | | | | | | | |
| 858 | K.ILIFQTDFEDGIR | | 812.777 | 3 | 2436.317 | 2436.313 | 0 | 1.3 | 3374 | 463.9 | 463.9 | 463.9 | 7.51 |
| | SAQLIASAK.Y | | | | | | | | | | | | |
| 2170 | K.ILIFQTDFEDGIR | | 783.912 | 2 | 1566.817 | 1566.816 | 0 | 0.4 | 3374 | 396.9 | 396.9 | 396.9 | 17.10 |
| | .S | | | | | | | | | | | | |
| 848 | K.YSVINEINK.I | | 540.290 | 2 | 1079.573 | 1079.573 | 0 | 0.0 | 3396 | 498.2 | 498.2 | 498.2 | 7.34 |
| 855 | R.RSTLMVSDVTR.L | | 422.228 | 3 | 1264.668 | 1264.668 | 0 | 0.1 | 3447 | 505.4 | 505.4 | 505.4 | 7.57 |
| 855 | R.RSTLMVSDVTR.L | | 422.227 | 3 | 1264.668 | 1264.668 | 0 | 0.2 | 3447 | 493.1 | 493.1 | 493.1 | 7.57 |
| 1242 | R.STLMVSDVTRLQH | | 732.790 | 5 | 3659.920 | 3659.921 | 0 | 0.4 | 3448 | 705.0 | 705.0 | 705.0 | 11.68 |
| | VTISQLFAPGDLPEL | | | | | | | | | | | | |
| | GLEHR.A | | | | | | | | | | | | |
| 1242 | R.STLMVSDVTRLQH | | 732.790 | 5 | 3659.921 | 3659.921 | 0 | 0.1 | 3448 | 701.4 | 701.4 | 701.4 | 12.39 |
| | VTISQLFAPGDLPEL | | | | | | | | | | | | |
| | GLEHR.A | | | | | | | | | | | | |
| 1242 | R.STLMVSDVTRLQH | | 732.790 | 5 | 3659.920 | 3659.921 | 0 | −0.3 | 3448 | 677.4 | 677.4 | 677.4 | 10.68 |
| | VTISQLFAPGDLPEL | | | | | | | | | | | | |
| | GLEHR.A | | | | | | | | | | | | |
| 1242 | R.STLMVSDVTRLQH | | 915.736 | 4 | 3659.921 | 3659.921 | 0 | 0.0 | 3448 | 630.3 | 630.3 | 630.3 | 10.39 |
| | VTISQLFAPGDLPEL | | | | | | | | | | | | |
| | GLEHR.A | | | | | | | | | | | | |
| 845 | R.STLMVSDVTR.L | | 554.787 | 2 | 1108.567 | 1108.567 | 0 | −0.2 | 3448 | 547.5 | 547.5 | 1547.5 | 8.02 |
| 1579 | R.STLM[+15.995] | M[+16] | 562.784 | 2. | 1124.562 | 1124.562 | 0 | 0.0 | 3448 | 494.4 | 494.4 | 494.4 | 8.54 |
| | VSDVTR.L | | | | | | | | | | | | |
| 845 | R.STLMVSDVTR.L | | 554.787 | 2 | 1108.567 | 1108.567 | 0 | −0.2 | 3448 | 482.0 | 336.6 | 336.6 | 6.29 |
| 845 | R.STLMVSDVTR.L | | 554.787 | 2 | 1108.567 | 1108.567 | 0 | −0.1 | 3448 | 369.4 | 369.4 | 369.4 | 6.72 |
| 1579 | R.STLM[+15.995] | M[+16] | 562.785 | 2 | 1124.562 | 1124.562 | 0 | 0.1 | 3448 | 365.3 | 365.3 | 365.3 | 6.72 |
| | VSDVTR.L | | | | | | | | | | | | |
| 845 | R.STLMVSDVTR.L | | 554.787 | 2 | 1108.567 | 1108.567 | 0 | −0.2 | 3448 | 352.7 | 305.0 | 305.0 | 5.57 |
| 845 | R.STLMVSDVTR.L | | 554.787 | 2 | 1108.567 | 1108.567 | 0 | 0.2 | 3448 | 319.6 | 319.6 | 319.6 | 5.24 |
| 845 | R.STLMVSDVTR.L | | 554.787 | 2 | 1108.567 | 1108.567 | 0 | 0.2 | 3448 | 305.8 | 305.8 | 305.8 | 5.40 |
| 979 | R.LQHVTISQLFAPG | | 643.349 | 4 | 2570.373 | 2570.373 | 0 | 0.2 | 3458 | 838.0 | 838.0 | 838.0 | 14.95 |
| | DLPELGLEHR.A | | | | | | | | | | | | |
| 1391 | R.LQHVTISQLFAPG | | 1073.339 | 6 | 6434.999 | 6435.004 | 0 | 0.7 | 3458 | 813.6 | 813.6 | 813.6 | 12.03 |
| | DLPELGLEHRAEDGH | | | | | | | | | | | | |
| | EEAMETEASTSGEVA | | | | | | | | | | | | |
| | EVAEEAMETESSEKV | | | | | | | | | | | | |
| | GK.E | | | | | | | | | | | | |
| 979 | R.LQHVTISQLFAPG | | 857.462 | 3 | 2570.371 | 2570.373 | 0 | −0.5 | 3458 | 795.5 | 795.5 | 795.5 | 13.26 |
| | DLPELGLEHR.A | | | | | | | | | | | | |
| 979 | R.LQHVTISQLFAPG | | 643.349 | 4 | 2570.373 | 2570.373 | 0 | 0.2 | 3458 | 721.3 | 721.3 | 721.3 | 12.96 |
| | DLPELGLEHR.A | | | | | | | | | | | | |
| 1391 | R.LQHVTISQLFAPG | | 1073.507 | 6 | 6436.008 | 6435.004 | 1 | 0.1 | 3458 | 687.0 | 687.0 | 687.0 | 9.74 |
| | DLPELGLEHRAEDGH | | | | | | | | | | | | |
| | EEAMETEASTSGEVA | | | | | | | | | | | | |
| | EVAEEAMETESSEKV | | | | | | | | | | | | |
| | GK.E | | | | | | | | | | | | |
| 979 | R.LQHVTISQLFAPG | | 857.796 | 3 | 2571.373 | 2570.373 | 1 | −1.2 | 3458 | 614.5 | 614.5 | 614.5 | 10.26 |
| | DLPELGLEHR.A | | | | | | | | | | | | |
| 835 | R.LQHVTISQLFAPG | | 1230.971 | 5 | 6150.824 | 6150.819 | 0 | 0.9 | 3458 | 572.2 | 572.2 | 572.2 | 7.62 |
| | DLPELGLEHRAEDGH | | | | | | | | | | | | |
| | EEAMETEASTSGEVA | | | | | | | | | | | | |
| | EVAEEAMETESSEK. | | | | | | | | | | | | |
| | V | | | | | | | | | | | | |
| 835 | R.LQHVTISQLFAPG | | 1231.171 | 5 | 6151.825 | 6150.819 | 1 | 0.4 | 3458 | 565.8 | 565.8 | 565.8 | 17.39 |
| | DLPELGLEHRAEDGH | | | | | | | | | | | | |
| | EEAMETEASTSGEVA | | | | | | | | | | | | |
| | EVAEEAMETESSEK. | | | | | | | | | | | | |
| | V | | | | | | | | | | | | |
| 835 | R.LQHVTISQLFAPG | | 1231.171 | 5 | 6151.825 | 6150.819 | 1 | 0.4 | 3458 | 548.4 | 548.4 | 548.4 | 16.40 |
| | DLPELGLEHRAEDGH | | | | | | | | | | | | |
| | EEAMETEASTSGEVA | | | | | | | | | | | | |
| | EVAEEAMETESSEK. | | | | | | | | | | | | |
| | V | | | | | | | | | | | | |
| 979 | R.LQHVTISQLFAPG | | 1285.690 | 2 | 2570.373 | 2570.373 | 0 | 0.3 | 3458 | 516.6 | 516.6 | 516.6 | 7.53 |
| | DLPELGLEHR.A | | | | | | | | | | | | |
| 835 | R.LQHVTISQLFAPG | | 879.551 | 7 | 6150.816 | 6150.819 | 0 | −0.5 | 3458 | 452.8 | 224.7 | 224.7 | 2.97 |
| | DLPELGLEHRAEDGH | | | | | | | | | | | | |
| | EEAMETEASTSGEVA | | | | | | | | | | | | |
| | EVAEEAMETESSEK. | | | | | | | | | | | | |
| | V | | | | | | | | | | | | |
| 835 | R.LQHVTISQLFAPG | | 1026.310 | 6 | 6152.821 | 6150.819 | 2 | −0.7 | 3458 | 391.3 | 148.2 | 148.2 | 2.68 |
| | DLPELGLEHRAEDGH | | | | | | | | | | | | |
| | EEAMETEASTSGEVA | | | | | | | | | | | | |
| | EVAEEAMETESSEK. | | | | | | | | | | | | |
| | V | | | | | | | | | | | | |
| 835 | R.LQHVTISQLFAPG | | 879.695 | 7 | 6151.820 | 6150.819 | 1 | −0.4 | 3458 | 387.7 | 387.7 | 387.7 | 4.24 |
| | DLPELGLEHRAEDGH | | | | | | | | | | | | |
| | EEAMETEASTSGEVA | | | | | | | | | | | | |
| | EVAEEAMETESSEK. | | | | | | | | | | | | |
| | V | | | | | | | | | | | | |
| 979 | R.LQHVTISQLFAPG | | 857.462 | 3 | 2570.371 | 2570.373 | 0 | −0.5 | 3458 | 375.4 | 375.4 | 375.4 | 6.77 |
| | DLPELGLEHR.A | | | | | | | | | | | | |
| 954 | R.AEDGHEEAMETEA | | 1129.704 | 5 | 5644.489 | 5644.492 | 0 | −0.5 | 3481 | 805.8 | 805.8 | 805.8 | 12.58 |
| | STSGEVAEVAEEAME | | | | | | | | | | | | |
| | TESSEKVGKETSELG | | | | | | | | | | | | |
| | GSDVSILDTTR.L | | | | | | | | | | | | |
| 954 | R.AEDGHEEAMETEA | | 1129.904 | 5 | 5645.493 | 5644.492 | 1 | 0.4 | 3481 | 779.6 | 779.6 | 779.6 | 11.58 |
| | STSGEVAEVAEEAME | | | | | | | | | | | | |
| | TESSEKVGKETSELG | | | | | | | | | | | | |
| | GSDVSILDTTR.L | | | | | | | | | | | | |
| 954 | R.AEDGHEEAMETEA | | 1129.703 | 5 | 5644.488 | 5644.492 | 0 | 0.8 | 3481 | 765.0 | 765.0 | 765.0 | 11.58 |
| | STSGEVAEVAEEAME | | | | | | | | | | | | |
| | TESSEKVGKETSELG | | | | | | | | | | | | |
| | GSDVSILDTTR.L | | | | | | | | | | | | |
| 954 | R.AEDGHEEAMETEA | | 1411.879 | 4 | 5644.492 | 5644.492 | 0 | 0.1 | 3481 | 762.5 | 762.5 | 1762.5 | 12.28 |
| | STSGEVAEVAEEAME | | | | | | | | | | | | |
| | TESSEKVGKETSELG | | | | | | | | | | | | |
| | GSDVSILDTTR.L | | | | | | | | | | | | |
| 954 | R.AEDGHEEAMETEA | | 1129.705 | 5 | 5644.493 | 5644.492 | 0 | 0.2 | 3481 | 726.8 | 726.8 | 726.8 | 11.28 |
| | STSGEVAEVAEEAME | | | | | | | | | | | | |
| | TESSEKVGKETSELG | | | | | | | | | | | | |
| | GSDVSILDTTR.L | | | | | | | | | | | | |
| 939 | R.AEDGHEEAMETEA | | 1295.890 | 3 | 3885.656 | 3883.649 | 2 | 0.0 | 3481 | 726.4 | 726.4 | 726.4 | 11.97 |
| | STSGEVAEVAEEAME | | | | | | | | | | | | |
| | TESSEKVGK.E | | | | | | | | | | | | |
| 939 | R.AEDGHEEAMETEA | | 971.668 | 4 | 3883.651 | 3883.649 | 0 | 0.3 | 3481 | 702.3 | 702.3 | 702.3 | 11.97 |
| | STSGEVAEVAEEAME | | | | | | | | | | | | |
| | TESSEKVGK.E | | | | | | | | | | | | |
| 939 | R.AEDGHEEAMETEA | | 971.668 | 4 | 3883.649 | 3883.649 | 0 | 0.0 | 3481 | 660.9 | 660.9 | 660.9 | 10.97 |
| | STSGEVAEVAEEAME | | | | | | | | | | | | |
| | TESSEKVGK.E | | | | | | | | | | | | |
| 948 | R.AEDGHEEAMETEA | | 1200.493 | 3 | 3599.466 | 3599.464 | 0 | 0.3 | 3481 | 635.1 | 635.1 | 635.1 | 10.58 |
| | STSGEVAEVAEEAME | | | | | | | | | | | | |
| | TESSEK.V | | | | | | | | | | | | |
| 948 | R.AEDGHEEAMETEA | | 1200.493 | 3 | 3599.464 | 3599.464 | 0 | 0.1 | 3481 | 620.2 | 620.2 | 620.2 | 10.58 |
| | STSGEVAEVAEEAME | | | | | | | | | | | | |
| | TESSEK.V | | | | | | | | | | | | |
| 948 | R.AEDGHEEAMETEA | | 1200.493 | 3 | 3599.465 | 3599.464 | 0 | 0.2 | 3481 | 611.3 | 611.3 | 611.3 | 10.58 |
| | STSGEVAEVAEEAME | | | | | | | | | | | | |
| | TESSEK.V | | | | | | | | | | | | |
| 948 | R.AEDGHEEAMETEA | | 1200.494 | 3 | 3599.467 | 3599.464 | 0 | 0.7 | 3481 | 609.0 | 609.0 | 609.0 | 10.58 |
| | STSGEVAEVAEEAME | | | | | | | | | | | | |
| | TESSEK.V | | | | | | | | | | | | |
| 954 | R.AEDGHEEAMETEA | | 1129.705 | 5 | 5644.495 | 5644.492 | 0 | 0.5 | 3481 | 605.5 | 605.5 | 605.5 | 8.08 |
| | STSGEVAEVAEEAME | | | | | | | | | | | | |
| | TESSEKVGKETSELG | | | | | | | | | | | | |
| | GSDVSILDTTR.L | | | | | | | | | | | | |
| 954 | R.AEDGHEEAMETEA | | 1411.879 | 4 | 5644.494 | 5644.492 | 0 | 0.4 | 3481 | 588.2 | 588.2 | 588.2 | 8.28 |
| | STSGEVAEVAEEAME | | | | | | | | | | | | |
| | TESSEKVGKETSELG | | | | | | | | | | | | |
| | GSDVSILDTTR.L | | | | | | | | | | | | |
| 954 | R.AEDGHEEAMETEA | | 1129.705 | 5 | 5644.496 | 5644.492 | 0 | 0.8 | 3481 | 588.0 | 588.0 | 588.0 | 7.31 |
| | STSGEVAEVAEEAME | | | | | | | | | | | | |
| | TESSEKVGKETSELG | | | | | | | | | | | | |
| | GSDVSILDTTR.L | | | | | | | | | | | | |
| 954 | R.AEDGHEEAMETEA | | 1129.706 | 5 | 5644.500 | 5644.492 | 0 | 1.4 | 3481 | 582.5 | 582.5 | 582.5 | 17.55 |
| | STSGEVAEVAEEAME | | | | | | | | | | | | |
| | TESSEKVGKETSELG | | | | | | | | | | | | |
| | GSDVSILDTTR.L | | | | | | | | | | | | |
| 954 | R.AEDGHEEAMETEA | | 1129.905 | 5 | 5645.497 | 5644.492 | 1 | 0.2 | 3481 | 570.5 | 570.5 | 570.5 | 7.31 |
| | STSGEVAEVAEEAME | | | | | | | | | | | | |
| | TESSEKVGKETSELG | | | | | | | | | | | | |
| | GSDVSILDTTR.L | | | | | | | | | | | | |
| 954 | R.AEDGHEEAMETEA | | 1411.879 | 4 | 5644.495 | 5644.492 | 0 | 0.6 | 3481 | 564.6 | 564.6 | 564.6 | 18.28 |
| | STSGEVAEVAEEAME | | | | | | | | | | | | |
| | TESSEKVGKETSELG | | | | | | | | | | | | |
| | GSDVSILDTTR.L | | | | | | | | | | | | |
| 3260 | R.AEDGHEEAM | M[+16] | 1133.304 | 5 | 5662.493 | 5660.487 | 2 | 0.1 | 3481 | 524.6 | 524.6 | 211.3 | 5.91 |
| | [+15.995] | | | | | | | | | | | | |
| | ETEASTSGEV | | | | | | | | | | | | |
| | AEVAEEAMETESSEK | | | | | | | | | | | | |
| | VGKETSELGGSDVSI | | | | | | | | | | | | |
| | LDTTR.L | | | | | | | | | | | | |
| 954 | R.AEDGHEEAMETEA | | 941.755 | 6 | 5645.493 | 5644.492 | 1 | 0.5 | 3481 | 519.6 | 519.6 | 519.6 | 4.73 |
| | STSGEVAEVAEEAME | | | | | | | | | | | | |
| | TESSEKVGKETSELG | | | | | | | | | | | | |
| | GSDVSILDTTR.L | | | | | | | | | | | | |
| 954 | R.AEDGHEEAMETEA | | 1129.905 | 5 | 5645.497 | 5644.492 | 1 | 0.2 | 3481 | 508.9 | 508.9 | 508.9 | 6.03 |
| | STSGEVAEVAEEAME | | | | | | | | | | | | |
| | TESSEKVGKETSELG | | | | | | | | | | | | |
| | GSDVSILDTTR.L | | | | | | | | | | | | |
| 948 | R.AEDGHEEAMETEA | | 1200.495 | 3 | 3599.470 | 3599.464 | 0 | 1.6 | 3481 | 465.7 | 465.7 | 465.7 | 7.08 |
| | STSGEVAEVAEEAME | | | | | | | | | | | | |
| | TESSEK.V | | | | | | | | | | | | |
| 954 | R.AEDGHEEAMETEA | | 1129.909 | 5 | 5645.515 | 5644.492 | 1 | 3.5 | 3481 | 418.4 | 418.4 | 418.4 | 4.11 |
| | STSGEVAEVAEEAME | | | | | | | | | | | | |
| | TESSEKVGKETSELG | | | | | | | | | | | | |
| | GSDVSILDTTR.L | | | | | | | | | | | | |
| 948 | R.AEDGHEEAMETEA | | 900.622 | 4 | 3599.465 | 3599.464 | 0 | 0.3 | 3481 | 417.3 | 417.3 | 417.3 | 6.22 |
| | STSGEVAEVAEEAME | | | | | | | | | | | | |
| | TESSEK.V | | | | | | | | | | | | |
| 954 | R.AEDGHEEAMETEA | | 1129.708 | 5 | 5644.510 | 5644.492 | 0 | 3.1 | 3481 | 415.8 | 415.8 | 415.8 | 14.11 |
| | STSGEVAEVAEEAME | | | | | | | | | | | | |
| | TESSEKVGKETSELG | | | | | | | | | | | | |
| | GSDVSILDTTR.L | | | | | | | | | | | | |
| 3072 | R.AEDGHEEAMETEA | S[+80] | 1145.699 | 5 | 5724.464 | 5724.458 | 0 | 1.0 | 3481 | 369.3 | 369.3 | 1.4 | 5.41 |
| | S[+79.966]TSGEV | | | | | | | | | | | | |
| | AEVAEEAMETESSEK | | | | | | | | | | | | |
| | VGKETSELGGSDVSI | | | | | | | | | | | | |
| | LDTTR.L | | | | | | | | | | | | |
| 939 | R.AEDGHEEAMETEA | | 972.170 | 4 | 3885.658 | 3883.649 | 2 | 0.4 | 3481 | 362.7 | 362.7 | 362.7 | 5.92 |
| | STSGEVAEVAEEAME | | | | | | | | | | | | |
| | TESSEKVGK.E | | | | | | | | | | | | |
| 4632 | R.AEDGHEEAMETEA | S[+80] | 954.916 | 6 | 5724.459 | 5724.458 | 0 | 0.0 | 3481 | 337.1 | 337.1 | 5.5 | 3.32 |
| | STS[+79.966]GEV | | | | | | | | | | | | |
| | AEVAEEAMETESSEK | | | | | | | | | | | | |
| | VGKETSELGGSDVSI | | | | | | | | | | | | |
| | LDTTR.L | | | | | | | | | | | | |
| 954 | R.AEDGHEEAMETEA | | 1129.704 | 5 | 5644.491 | 5644.492 | 0 | −0.2 | 3481 | 335.6 | 335.6 | 335.6 | 3.77 |
| | STSGEVAEVAEEAME | | | | | | | | | | | | |
| | TESSEKVGKETSELG | | | | | | | | | | | | |
| | GSDVSILDTTR.L | | | | | | | | | | | | |
| 988 | K.VGKETSELGGSDV | | 1032.527 | 2 | 2064.046 | 2064.046 | 0 | 0.2 | 3515 | 709.9 | 709.9 | 709.9 | 12.77 |
| | SILDTTR.L | | | | | | | | | | | | |
| 1119 | K.VGKETSELGGSDV | | 612.334 | 4 | 2446.314 | 2446.315 | 0 | 0.1 | 3515 | 552.2 | 552.2 | 552.2 | 18.62 |
| | SILDTTRLLR.S | | | | | | | | | | | | |
| 988 | K.VGKETSELGGSDV | | 688.687 | 3 | 2064.046 | 2064.046 | 0 | 0.3 | 3515 | 511.8 | 511.8 | 511.8 | 8.72 |
| | SILDTTR.L | | | | | | | | | | | | |
| 827 | K.ETSELGGSDVSIL | | 890.434 | 2 | 1779.860 | 1779.861 | 0 | −0.5 | 3518 | 648.9 | 648.9 | 648.9 | 10.26 |
| | DTTR.L | | | | | | | | | | | | |
| 827 | K.ETSELGGSDVSIL | | 593.959 | 3 | 1779.862 | 1779.861 | 0 | 0.6 | 3518 | 507.8 | 507.8 | 507.8 | 7.59 |
| | DTTR.L | | | | | | | | | | | | |
| 827 | K.ETSELGGSDVSIL | | 890.432 | 2 | 1779.857 | 1779.861 | 0 | −2.3 | 3518 | 449.9 | 449.9 | 449.9 | 17.96 |
| | DTTR.L | | | | | | | | | | | | |
| 1679 | R.SC[+57.021]VQ | C[+57] | 733.664 | 3 | 2198.977 | 2197.975 | 1 | −0.4 | 3538 | 533.5 | 533.5 | 469.8 | 8.23 |
| | SAVGMLRDQNESC | *2 | | | | | | | | | | | |
| | [+57.021]TR.N | | | | | | | | | | | | |
| 1713 | R.SC[+57.021]VQ | C[+57] | 604.300 | 2 | 1207.593 | 1207.592 | 0 | 0.3 | 3538 | 529.2 | 483.9 | 483.9 | 8.02 |
| | SAVGMLR.D | | | | | | | | | | | | |
| 1727 | R.VVLLLGLLNEDDA | C[+57] | 752.401 | 3 | 2255.187 | 2255.185 | 0 | 0.7 | 3561 | 455.0 | 455.0 | 455.0 | 7.94 |
| | C[+57.021]HASFL | | | | | | | | | | | | |
| | R.V | | | | | | | | | | | | |
| 1727 | R.VVLLLGLLNEDDA | C[+57] | 752.401 | 3 | 2255.187 | 2255.185 | 0 | 0.9 | 3561 | 403.4 | 403.4 | 403.4 | 17.59 |
| | C[+57.021]HASFL | | | | | | | | | | | | |
| | R.V | | | | | | | | | | | | |
| 828 | R.LSVFLKKQEESQF | | 517.884 | 5 | 2585.389 | 2585.388 | 0 | 0.4 | 3586 | 449.0 | 449.0 | 449.0 | 7.20 |
| | HPLEWLAR.E | | | | | | | | | | | | |
| 1038 | K.KQEESQFHPLEWL | | 633.324 | | 31897.958 | 1897.956 | 0 | 1.3 | 3592 | 565.8 | 565.8 | 565.8 | 9.96 |
| | AR.E | | | | | | | | | | | | |
| 859 | K.QEESQFHPLEWLA | | 590.625 | 3 | 1769.860 | 1769.861 | 0 | −0.3 | 3593 | 555.3 | 555.3 | 555.3 | 9.12 |
| | R.E | | | | | | | | | | | | |
| 859 | K.QEESQFHPLEWLA | | 885.434 | 2 | 1769.861 | 1769.861 | 0 | 0.3 | 3593 | 470.3 | 470.3 | 470.3 | 8.67 |
| | R.E | | | | | | | | | | | | |
| 1739 | R.EAC[+57.021]N | C[+57] | 855.381 | 2 | 1709.754 | 1709.755 | 0 | −0.6 | 3607 | 637.6 | 637.6 | 637.6 | 10.26 |
| | QDALQEAGTFR.H | | | | | | | | | | | | |
| 2234 | R.VQGAVTPLLASMI | | 640.021 | 3 | 1918.047 | 1918.047 | 0 | 0.3 | 3628 | 436.8 | 436.8 | 436.8 | 7.24 |
| | SFIDR.D | | | | | | | | | | | | |
| 1214 | K.IKDYLEELWVQAQ | | 908.479 | 3 | 2723.422 | 2722.397 | 1 | 7.7 | 3715 | 618.4 | 618.4 | 618.4 | 9.42 |
| | YITDAEGLPK.K | | | | | | | | | | | | |
| 1094 | K.IKDYLEELWVQAQ | | 713.380 | 4 | 2850.497 | 2850.492 | 0 | 1.7 | 3715 | 529.6 | 529.6 | 529.6 | 17.89 |
| | YITDAEGLPKK.F | | | | | | | | | | | | |
| 1856 | K.KFVDIFQQTPLGR | | 516.956 | 3 | 1548.853 | 1548.853 | 0 | 0.0 | 3738 | 409.9 | 409.9 | 409.9 | 7.22 |
| | .F | | | | | | | | | | | | |
| 1856 | K.KFVDIFQQTPLGR | | 517.291 | 3 | 1549.857 | 1548.853 | 1 | 0.1 | 3738 | 357.3 | 357.3 | 357.3 | 3.76 |
| | .F | | | | | | | | | | | | |
| 1379 | R.KLKAASEAPEEEV | | 688.617 | 4 | 2751.448 | 2751.446 | 0 | 0.4 | 3797 | 755.0 | 755.0 | 755.0 | 13.77 |
| | SLPWVHLAYQR.F | | | | | | | | | | | | |
| 1379 | R.KLKAASEAPEEEV | | 688.617 | 4 | 2751.448 | 2751.446 | 0 | 0.4 | 3797 | 708.1 | 708.1 | 708.1 | 12.77 |
| | SLPWVHLAYQR.F | | | | | | | | | | | | |
| 1379 | R.KLKAASEAPEEEV | | 688.868 | 4 | 2752.448 | 2751.446 | 1 | 0.7 | 3797 | 374.5 | 374.5 | 374.5 | 16.34 |
| | SLPWVHLAYQR.F | | | | | | | | | | | | |
| 1167 | K.LKAASEAPEEEVS | | 875.122 | 3 | 2623.351 | 2623.352 | 0 | 0.0 | 3798 | 849.1 | 849.1 | 849.1 | 14.78 |
| | LPWVHLAYQR.F | | | | | | | | | | | | |
| 1167 | K.LKAASEAPEEEVS | | 656.593 | 4 | 2623.352 | 2623.352 | 0 | 0.0 | 3798 | 698.8 | 698.8 | 698.8 | 11.77 |
| | LPWVHLAYQR.F | | | | | | | | | | | | |
| 1167 | K.LKAASEAPEEEVS | | 656.594 | 4 | 2623.352 | 2623.352 | 0 | 0.3 | 3798 | 605.3 | 605.3 | 605.3 | 10.77 |
| | LPWVHLAYQR.F | | | | | | | | | | | | |
| 1273 | K.AASEAPEEEVSLP | | 794.729 | 3 | 2382.172 | 2382.173 | 0 | 0.0 | 3800 | 835.6 | 835.6 | 835.6 | 14.95 |
| | WVHLAYQR.F | | | | | | | | | | | | |
| 1273 | K.AASEAPEEEVSLP | | 794.729 | 3 | 2382.172 | 2382.173 | 0 | −0.1 | 3800 | 755.7 | 755.7 | 755.7 | 13.96 |
| | WVHLAYQR.F | | | | | | | | | | | | |
| 1273 | K.AASEAPEEEVSLP | | 1191.589 | 2 | 2382.171 | 2382.173 | 0 | 0.6 | 3800 | 649.7 | 649.7 | 649.7 | 10.26 |
| | WVHLAYQR.F | | | | | | | | | | | | |
| 947 | R.ILTIYPQVLHSLM | | 628.685 | 3 | 1884.041 | 1884.041 | 0 | 0.1 | 3831 | 622.0 | 622.0 | 622.0 | 10.96 |
| | EAR.W | | | | | | | | | | | | |
| 947 | R.ILTIYPQVLHSLM | | 628.686 | 3 | 1884.042 | 1884.041 | 0 | 0.3 | 3831 | 617.4 | 617.4 | 617.4 | 10.96 |
| | EAR.W | | | | | | | | | | | | |
| 1588 | R.ILTIYPQVLHSLM | M[+16] | 634.017 | 3 | 1900.037 | 1900.036 | 0 | 0.5 | 3831 | 539.3 | 539.3 | 539.3 | 9.12 |
| | [+15.995]EAR.W | | | | | | | | | | | | |
| 947 | R.ILTIYPQVLHSLM | | 628.686 | 3 | 1884.042 | 1884.041 | 0 | 0.5 | 3831 | 498.2 | 498.2 | 498.2 | 8.91 |
| | EAR.W | | | | | | | | | | | | |
| 1947 | R.ILTIYPQVLHSLM | | 628.686 | 3 | 1884.042 | 1884.041 | 0 | 0.4 | 3831 | 445.9 | 445.9 | 445.9 | 7.94 |
| | EAR.W | | | | | | | | | | | | |
| 947 | R.ILTIYPQVLHSLM | | 628.685 | 3 | 1884.041 | 1884.041 | 0 | 0.1 | 3831 | 310.3 | 310.3 | 310.3 | 6.00 |
| | EAR.W | | | | | | | | | | | | |
| 992 | R.NTLKPSPQAWLQL | | 575.002 | 3 | 1722.990 | 1722.990 | 0 | 0.1 | 3873 | 665.2 | 665.2 | 665.2 | 11.96 |
| | VK.N | | | | | | | | | | | | |
| 992 | R.NTLKPSPQAWLQL | | 575.001 | 3 | 1722.989 | 1722.990 | 0 | 0.5 | 3873 | 640.8 | 640.8 | 640.8 | 10.26 |
| | VK.N | | | | | | | | | | | | |
| 992 | R.NTLKPSPQAWLQL | | 861.998 | 2 | 1722.989 | 1722.990 | 0 | 0.4 | 3873 | 518.9 | 518.9 | 518.9 | 8.21 |
| | VK.N | | | | | | | | | | | | |
| 992 | R.NTLKPSPQAWLQL | | 575.002 | 3 | 1722.991 | 1722.990 | 0 | 0.5 | 3873 | 336.7 | 336.7 | 336.7 | 6.09 |
| | VK.N | | | | | | | | | | | | |
| 4633 | K.NLSMPLELIC | C[+57] | 986.483 | 3 | 2957.433 | 2956.433 | 1 | −0.9 | 3888 | 711.5 | 703.0 | 272.1 | 11.87 |
| | [+57.021]SD | | | | | | | | | | | | |
| | EHMQGSG | | | | | | | | | | | | |
| | SLAQAVIR.E | | | | | | | | | | | | |
| 2814 | R.IFSTALFVEHVLL | | 673.703 | 3 | 2019.093 | 2019.091 | 0 | 1.1 | 3923 | 355.0 | 355.0 | 355.0 | 6.09 |
| | GTESR.V | | | | | | | | | | | | |
| 1047 | R.VPELQGLVTEHVF | | 646.363 | 3 | 1937.075 | 1937.074 | 0 | 0.6 | 3941 | 611.8 | 611.8 | 611.8 | 10.96 |
| | LLDK.C | | | | | | | | | | | | |
| 1047 | R.VPELQGLVTEHVF | | 646.364 | 3 | 1937.076 | 1937.074 | 0 | 0.9 | 3941 | 596.7 | 596.7 | 596.7 | 9.96 |
| | LLDK.C | | | | | | | | | | | | |
| 1047 | R.VPELQGLVTEHVF | | 646.363 | 3 | 1937.074 | 1937.074 | 0 | 0.0 | 3941 | 330.8 | 330.8 | 330.8 | 5.86 |
| | LLDK.C | | | | | | | | | | | | |
| 3298 | K.C[+57.021]LRE | C[+57] | 562.275 | 4 | 2246.079 | 2246.081 | 0 | 0.6 | 3958 | 418.3 | 418.3 | 1418.3 | 6.38 |
| | NSDVKTHGPFEAVMR | | | | | | | | | | | | |
| | .T | | | | | | | | | | | | |
| 1090 | R.ENSDVKTHGPFEA | | 606.293 | 3 | 1816.865 | 1816.865 | 0 | 0.1 | 3961 | 594.7 | 594.7 | 594.7 | 9.77 |
| | VMR.T | | | | | | | | | | | | |
| 1090 | R.ENSDVKTHGPFEA | | 908.936 | 2 | 1816.865 | 1816.865 | 0 | 0.0 | 3961 | 594.6 | 594.6 | 594.6 | 8.39 |
| | VMR.T | | | | | | | | | | | | |
| 1090 | R.ENSDVKTHGPFEA | | 606.293 | 3 | 1816.864 | 1816.865 | 0 | −0.4 | 3961 | 571.2 | 571.2 | 1571.2 | 9.06 |
| | VMR.T | | | | | | | | | | | | |
| 1090 | R.ENSDVKTHGPFEA | | 909.437 | 2 | 1817.866 | 1816.865 | 1 | −1.0 | 3961 | 515.3 | 515.3 | 160.9 | 6.63 |
| | VMR.T | | | | | | | | | | | | |
| 1090 | R.ENSDVKTHGPFEA | | 454.972 | 4 | 1816.864 | 1816.865 | 0 | 0.1 | 3961 | 422.5 | 422.5 | 1422.5 | 7.64 |
| | VMR.T | | | | | | | | | | | | |
| 1090 | R.ENSDVKTHGPFEA | | 454.972 | 4 | 1816.865 | 1816.865 | 0 | −0.1 | 3961 | 405.6 | 405.6 | 405.6 | 7.17 |
| | VMR.T | | | | | | | | | | | | |
| 1090 | R.ENSDVKTHGPFEA | | 454.972 | 4 | 1816.865 | 1816.865 | 0 | 0.3 | 3961 | 388.2 | 388.2 | 1388.2 | 7.28 |
| | VMR.T | | | | | | | | | | | | |
| 4634 | R.ENSDVKTHGPFEA | M[+16] | 611.625 | 3 | 1832.861 | 1832.860 | 0 | 0.6 | 3961 | 336.5 | 336.5 | 336.5 | 5.51 |
| | VM[+15.995]R.T | | | | | | | | | | | | |
| 4634 | R.ENSDVKTHGPFEA | M[+16] | 611.625 | 3 | 1832.861 | 1832.860 | 0 | 0.6 | 3961 | 318.6 | 318.6 | 318.6 | 5.42 |
| | VM[+15.995]R.T | | | | | | | | | | | | |
| 825 | K.THGPFEAVMR.T | | 572.782 | 2 | 1144.557 | 1144.557 | 0 | 0.0 | 3967 | 529.5 | 529.5 | 529.5 | 8.02 |
| 825 | K.THGPFEAVMR.T | | 572.782 | 2 | 1144.556 | 1144.557 | 0 | −0.4 | 3967 | 466.6 | 466.6 | 466.6 | 6.62 |
| 825 | K.THGPFEAVMR.T | | 572.782 | 2 | 1144.557 | 1144.557 | 0 | −0.2 | 3967 | 432.7 | 432.7 | 432.7 | 6.99 |
| 825 | K.THGPFEAVMR.T | | 572.782 | 2 | 1144.556 | 1144.557 | 0 | −0.3 | 3967 | 432.7 | 432.7 | 432.7 | 6.51 |
| 856 | K.DNAPPEKEVIESL | | 790.438 | 3 | 2369.301 | 2369.296 | 0 | 1.9 | 4080 | 623.9 | 623.9 | 623.9 | 10.77 |
| | LSLLFVQK.G | | | | | | | | | | | | |
| 856 | K.DNAPPEKEVIESL | | 1185.155 | 2 | 2369.303 | 2369.296 | 0 | 2.9 | 4080 | 473.3 | 473.3 | 473.3 | 7.24 |
| | LSLLFVQK.G | | | | | | | | | | | | |
| 856 | K.DNAPPEKEVIESL | | 593.080 | 4 | 2369.299 | 2369.296 | 0 | 1.1 | 4080 | 458.0 | 458.0 | 458.0 | 7.88 |
| | LSLLFVQK.G | | | | | | | | | | | | |
| 2072 | K.SLSPFNDVVDKTP | | 596.328 | 3 | 1786.970 | 1786.970 | 0 | 0.0 | 4116 | 402.5 | 402.5 | 1402.5 | 7.64 |
| | VIR.S | | | | | | | | | | | | |
| 2072 | K.SLSPFNDVVDKTP | | 893.988 | 2 | 1786.968 | 1786.970 | 0 | −1.0 | 4116 | 365.1 | 365.1 | 365.1 | 6.57 |
| | VIR.S | | | | | | | | | | | | |
| 1408 | K.TSAYSRNDELNHL | | 707.326 | 3 | 2119.965 | 2119.964 | 0 | 0.3 | 4186 | 768.3 | 768.3 | 768.3 | 13.77 |
| | EEEGR.F | | | | | | | | | | | | |
| 936 | K.TSAYSRNDELNHL | | 627.808 | 4 | 2508.211 | 2508.211 | 0 | −0.2 | 4186 | 506.5 | 506.5 | 506.5 | 8.41 |
| | EEEGRFLK.A | | | | | | | | | | | | |
| 936 | K.TSAYSRNDELNHL | | 836.741 | 3 | 2508.209 | 2508.211 | 0 | −0.9 | 4186 | 503.3 | 503.3 | 503.3 | 5.59 |
| | EEEGRFLK.A | | | | | | | | | | | | |
| 1408 | K.TSAYSRNDELNHL | | 530.747 | 4 | 2119.964 | 2119.964 | 0 | 0.1 | 4186 | 440.3 | 440.3 | 440.3 | 7.51 |
| | EEEGR.F | | | | | | | | | | | | |
| 936 | K.TSAYSRNDELNHL | | 502.649 | 5 | 2509.215 | 2508.211 | 1 | 0.2 | 4186 | 431.3 | 431.3 | 89.2 | 7.09 |
| | EEEGRFLK.A | | | | | | | | | | | | |
| 1408 | K.TSAYSRNDELNHL | | 1060.485 | 2 | 2119.963 | 2119.964 | 0 | −0.3 | 4186 | 428.1 | 428.1 | 428.1 | 6.26 |
| | EEEGR.F | | | | | | | | | | | | |
| 936 | K.TSAYSRNDELNHL | | 502.448 | 5 | 2508.210 | 2508.211 | 0 | −0.6 | 4186 | 398.1 | 398.1 | 398.1 | 6.26 |
| | EEEGRFLK.A | | | | | | | | | | | | |
| 936 | K.TSAYSRNDELNHL | | 627.808 | 4 | 2508.212 | 2508.211 | 0 | 0.2 | 4186 | 395.9 | 395.9 | 395.9 | 6.97 |
| | EEEGRFLK.A | | | | | | | | | | | | |
| 1482 | K.TSAYSRNDELN | N[+1] | 502.645 | 5 | 2509.195 | 2509.195 | 0 | −0.3 | 4186 | 366.3 | 366.3 | 41.3 | 6.97 |
| | [+0.984]HLEE | | | | | | | | | | | | |
| | EGRFL | | | | | | | | | | | | |
| | K.A | | | | | | | | | | | | |
| 936 | K.TSAYSRNDELNHL | | 502.645 | 5 | 2509.197 | 2508.211 | 1 | −7.2 | 4186 | 345.9 | 345.9 | 24.8 | 4.10 |
| | EEEGRFLK.A | | | | | | | | | | | | |
| 936 | K.TSAYSRNDELNHL | | 627.809 | 4 | 2508.212 | 2508.211 | 0 | 0.4 | 4186 | 343.6 | 343.6 | 343.6 | 5.35 |
| | EEEGRFLK.A | | | | | | | | | | | | |
| 936 | K.TSAYSRNDELNHL | | 837.075 | 3 | 2509.211 | 2508.211 | 1 | −1.5 | 4186 | 337.8 | 283.0 | 261.0 | 3.12 |
| | EEEGRFLK.A | | | | | | | | | | | | |
| 1408 | K.TSAYSRNDELNHL | | 530.993 | 4 | 2120.949 | 2119.964 | 1 | −8.8 | 4186 | 321.7 | 321.7 | 6.0 | 4.41 |
| | EEEGR.F | | | | | | | | | | | | |
| 978 | R.NDELNHLEEEGRF | | 614.971 | 3 | 1842.898 | 1842.898 | 0 | 0.1 | 4192 | 731.5 | 731.5 | 731.5 | 12.77 |
| | LK.A | | | | | | | | | | | | |
| 1494 | R.N[+0.984]DELN | N[+1] | 615.299 | 3 | 1843.884 | 1843.882 | 0 | 0.9 | 4192 | 668.8 | 668.8 | 231.3 | 11.77 |
| | HLEEEGRFLK.A | | | | | | | | | | | | |
| 1494 | R.N[+0.984]DELN | N[+1] | 461.726 | 4 | 1843.882 | 1843.882 | 0 | −0.1 | 4192 | 550.5 | 550.5 | 135.4 | 8.93 |
| | HLEEEGRFLK.A | | | | | | | | | | | | |
| 978 | R.NDELNHLEEEGRF | | 461.480 | 4 | 1842.897 | 1842.898 | 0 | 0.4 | 4192 | 527.7 | 527.7 | 527.7 | 18.23 |
| | LK.A | | | | | | | | | | | | |
| 1496 | R.NDELN[+0.984] | N[+1] | 485.883 | 3 | 1455.634 | 1455.635 | 0 | 0.2 | 4192 | 514.8 | 389.0 | 313.1 | 8.54 |
| | HLEEEGR.F | | | | | | | | | | | | |
| 1488 | R.NDELN[+0.984] | N[+1] | 461.726 | 4 | 1843.882 | 1843.882 | 0 | −0.3 | 4192 | 507.0 | 507.0 | 174.3 | 18.72 |
| | HLEEEGRFLK.A | | | | | | | | | | | | |
| 1496 | R.NDELN[+0.984] | N[+1] | 485.883 | 3 | 1455.634 | 1455.635 | 0 | −0.4 | 4192 | 500.7 | 415.4 | 339.0 | 6.86 |
| | HLEEEGR.F | | | | | | | | | | | | |
| 807 | R.NDELNHLEEEGR. | | 485.555 | 3 | 1454.650 | 1454.651 | 0 | 0.5 | 4192 | 491.4 | 491.4 | 1491.4 | 7.10 |
| | F | | | | | | | | | | | | |
| 807 | R.NDELNHLEEEGR. | | 727.829 | 2 | 1454.651 | 1454.651 | 0 | 0.0 | 4192 | 478.9 | 478.9 | 478.9 | 7.57 |
| | F | | | | | | | | | | | | |
| 978 | R.NDELNHLEEEGRF | | 921.952 | 2. | 1842.898 | 1842.898 | 0 | 0.3 | 4192 | 477.5 | 477.5 | 477.5 | 16.39 |
| | LK.A | | | | | | | | | | | | |
| 807 | R.NDELNHLEEEGR. | | 485.555 | 3 | 1454.650 | 1454.651 | 0 | −0.4 | 4192 | 464.4 | 464.4 | 464.4 | 6.62 |
| | F | | | | | | | | | | | | |
| 978 | R.NDELNHLEEEGRF | | 461.480 | 4 | 1842.898 | 1842.898 | 0 | 0.1 | 4192 | 453.5 | 453.5 | 453.5 | 8.48 |
| | LK.A | | | | | | | | | | | | |
| 978 | R.NDELNHLEEEGRF | | 614.971 | 3 | 1842.898 | 1842.898 | 0 | −0.2 | 4192 | 412.4 | 412.4 | 412.4 | 7.40 |
| | LK.A | | | | | | | | | | | | |
| 978 | R.NDELNHLEEEGRF | | 614.971 | 3 | 1842.898 | 1842.898 | 0 | 0.1 | 4192 | 408.8 | 408.8 | 1408.8 | 7.64 |
| | LK.A | | | | | | | | | | | | |
| 1488 | R.NDELN[+0.984] | N[+1] | 615.299 | 3 | 1843.882 | 1843.882 | 0 | 0.0 | 4192 | 379.7 | 379.7 | 244.5 | 7.28 |
| | HLEEEGRFLK.A | | | | | | | | | | | | |
| 978 | R.NDELNHLEEEGRF | | 461.480 | 4 | 1842.898 | 1842.898 | 0 | 0.0 | 4192 | 361.0 | 361.0 | 361.0 | 7.28 |
| | LK.A | | | | | | | | | | | | |
| 807 | R.NDELNHLEEEGR. | | 485.555 | 3 | 1454.650 | 1454.651 | 0 | −0.2 | 4192 | 359.8 | 359.8 | 359.8 | 5.48 |
| | F | | | | | | | | | | | | |
| 1496 | R.NDELN[+0.984] | N[+1] | 485.883 | 3 | 1455.635 | 1455.635 | 0 | 0.5 | 4192 | 332.4 | 332.4 | 187.2 | 5.48 |
| | HLEEEGR.F | | | | | | | | | | | | |
| 831 | R.GREPANEASVEYL | | 673.336 | 3 | 2017.994 | 2017.994 | 0 | 0.3 | 4214 | 528.3 | 528.3 | 528.3 | 8.93 |
| | QEVAR.I | | | | | | | | | | | | |
| 831 | R.GREPANEASVEYL | | 1009.501 | 2 | 2017.996 | 2017.994 | 0 | 0.9 | 4214 | 460.5 | 460.5 | 460.5 | 8.48 |
| | QEVAR.I | | | | | | | | | | | | |
| 831 | R.GREPANEASVEYL | | 1009.500 | 2. | 2017.993 | 2017.994 | 0 | −0.2 | 4214 | 427.7 | 427.7 | 427.7 | 7.64 |
| | QEVAR.I | | | | | | | | | | | | |
| 831 | R.GREPANEASVEYL | | 673.336 | 3 | 2017.994 | 2017.994 | 0 | −0.1 | 4214 | 422.8 | 422.8 | 422.8 | 7.64 |
| | QEVAR.I | | | | | | | | | | | | |
| 831 | R.GREPANEASVEYL | | 505.254 | 4 | 2017.994 | 2017.994 | 0 | 0.2 | 4214 | 412.7 | 412.7 | 412.7 | 6.80 |
| | QEVAR.I | | | | | | | | | | | | |
| 4636 | R.GREPAN | N[+1] | 673.665 | 3 | 2018.979 | 2018.978 | 0 | 0.7 | 4214 | 343.4 | 343.4 | 118.6 | 5.51 |
| | [+0.984]E | | | | | | | | | | | | |
| | ASVEYLQEVAR.I | | | | | | | | | | | | |
| 927 | R.EPANEASVEYLQE | | 902.939 | 2 | 1804.870 | 1804.871 | 0 | −0.7 | 4216 | 490.1 | 490.1 | 490.1 | 8.21 |
| | VAR.I | | | | | | | | | | | | |
| 1624 | R.AADFLSEPEGGPE | M[+16] | 641.300 | 32 | 1921.885 | 1921.885 | 0 | 0.1 | 4239 | 682.0 | 682.0 | 682.0 | 11.77 |
| | M[+15.995]AKEK. | | | | | | | | | | | | |
| | Q | | | | | | | | | | | | |
| 929 | R.AADFLSEPEGGPE | | 824.880 | | 1648.752 | 1648.752 | 0 | 0.0 | 4239 | 679.7 | 679.7 | 679.7 | 11.96 |
| | MAK.E | | | | | | | | | | | | |
| 1232 | R.AADFLSEPEGGPE | | 635.968 | 3 | 1905.890 | 1905.890 | 0 | −0.1 | 4239 | 667.8 | 667.8 | 667.8 | 11.77 |
| | MAKEK.Q | | | | | | | | | | | | |
| 929 | R.AADFLSEPEGGPE | | 824.880 | 2 | 1648.753 | 1648.752 | 0 | 0.3 | 4239 | 655.0 | 655.0 | 655.0 | 11.96 |
| | MAK.E | | | | | | | | | | | | |
| 1232 | R.AADFLSEPEGGPE | | 953.449 | 2 | 1905.890 | 1905.890 | 0 | 0.1 | 4239 | 627.3 | 627.3 | 627.3 | 10.77 |
| | MAKEK.Q | | | | | | | | | | | | |
| 929 | R.AADFLSEPEGGPE | | 550.256 | 3 | 1648.753 | 1648.752 | 0 | 0.2 | 4239 | 482.5 | 482.5 | 482.5 | 7.34 |
| | MAK.E | | | | | | | | | | | | |
| 1624 | R.AADFLSEPEGGPE | M[+16] | 961.446 | 2 | 1921.885 | 1921.885 | 0 | 0.3 | 4239 | 402.7 | 395.0 | 395.0 | 8.37 |
| | M[+15.995]AKEK. | | | | | | | | | | | | |
| | Q | | | | | | | | | | | | |
| 1036 | R.GMEFVQGLSKPGR | | 809.091 | 3 | 2425.258 | 2425.260 | 0 | −0.8 | 4288 | 542.7 | 542.7 | 542.7 | 7.04 |
| | PHQWVFPK.D | | | | | | | | | | | | |
| 1036 | R.GMEFVQGLSKPGR | | 607.070 | 4 | 2425.260 | 2425.260 | 0 | 0.1 | 4288 | 438.1 | 438.1 | 438.1 | 8.56 |
| | PHQWVFPK.D | | | | | | | | | | | | |
| 1036 | R.GMEFVQGLSKPGR | | 485.858 | 5 | 2425.260 | 2425.260 | 0 | 0.0 | 4288 | 429.5 | 429.5 | 429.5 | 7.83 |
| | PHQWVFPK.D | | | | | | | | | | | | |
| 1036 | R.GMEFVQGLSKPGR | | 607.070 | 4 | 2425.260 | 2425.260 | 0 | −0.1 | 4288 | 379.1 | 379.1 | 379.1 | 7.47 |
| | PHQWVFPK.D | | | | | | | | | | | | |
| 1551 | R.GM[+15.995]EF | M[+16] | 611.069 | 4 | 2441.255 | 2441.255 | 0 | 0.3 | 4288 | 372.0 | 372.0 | 372.0 | 7.47 |
| | VQGLSKPGRPHQWVF | | | | | | | | | | | | |
| | PK.D | | | | | | | | | | | | |
| 1036 | R.GMEFVQGLSKPGR | | 607.070 | 4 | 2425.260 | 2425.260 | 0 | −0.1 | 4288 | 350.6 | 350.6 | 350.6 | 6.09 |
| | PHQWVFPK.D | | | | | | | | | | | | |
| 1551 | R.GM[+15.995]EF | M[+16] | 489.057 | 5 | 2441.255 | 2441.255 | 0 | 0.1 | 4288 | 320.5 | 320.5 | 320.5 | 6.09 |
| | VQGLSKPGRPHQWVF | | | | | | | | | | | | |
| | PK.D | | | | | | | | | | | | |
| 1551 | R.GM[+15.995]EF | M[+16] | 489.057 | 5 | 2441.255 | 2441.255 | 0 | −0.1 | 4288 | 312.8 | 312.8 | 312.8 | 5.77 |
| | VQGLSKPGRPHQWVF | | | | | | | | | | | | |
| | PK.D | | | | | | | | | | | | |
| 4637 | K.PGRPHQWVFPK.D | | 450.247 | 3 | 1348.728 | 1348.727 | 0 | 0.2 | 4298 | 387.6 | 387.6 | 387.6 | 6.54 |
| 1058 | K.DVVKQQGLRQDHP | | 703.022 | 3 | 2107.050 | 2107.046 | 0 | 1.8 | 4309 | 541.0 | 541.0 | 541.0 | 7.24 |
| | GQMDR.Y | | | | | | | | | | | | |
| 1527 | K.DVVKQQGLRQDHP | M[+16] | 708.352 | 3 | 2123.040 | 2123.041 | 0 | −0.4 | 4309 | 423.3 | 318.0 | 318.0 | 3.57 |
| | GQM[+15.995]DR. | | | | | | | | | | | | |
| | Y | | | | | | | | | | | | |
| 1058 | K.DVVKQQGLRQDHP | | 527.517 | 4 | 2107.046 | 2107.046 | 0 | −0.2 | 4309 | 325.7 | 325.7 | 325.7 | 5.35 |
| | GQMDR.Y | | | | | | | | | | | | |
| 1058 | K.DVVKQQGLRQDHP | | 422.216 | 5 | 2107.049 | 2107.046 | 0 | 1.2 | 4309 | 316.2 | 316.2 | 316.2 | 5.50 |
| | GQMDR.Y | | | | | | | | | | | | |
| 1527 | K.DVVKQQGLRQDHP | M[+16] | 531.516 | 4 | 2123.042 | 2123.041 | 0 | 0.3 | 4309 | 311.5 | 311.5 | 311.5 | 5.27 |
| | GQM[+15.995]DR. | | | | | | | | | | | | |
| | Y | | | | | | | | | | | | |
| 1880 | K.QQGLRQDHPGQMD | | 933.444 | 3 | 2798.318 | 2796.316 | 2 | −1.5 | 4313 | 398.2 | 398.2 | 398.2 | 5.13 |
| | RYLVYGDEYK.A | | | | | | | | | | | | |
| 1544 | K.QQGLRQDHPGQM | M[+16] | 704.084 | | :2813.316 | 2812.311 | 1 | 0.6 | 4313 | 370.2 | 370.2 | 370.2 | 6.74 |
| | [+15.995]DRYL | | | | | | | | | | | | |
| | VYGDEYK.A | | | | | | | | | | | | |
| 1544 | K.QQGLRQDHPGQM | M[+16] | 703.833 | 4 | 2812.308 | 2812.311 | 0 | 0.9 | 4313 | 333.6 | 333.6 | 333.6 | 4.65 |
| | [+15.995]DRYL | | | | | | | | | | | | |
| | VYGDEYK.A | | | | | | | | | | | | |
| 1880 | K.QQGLRQDHPGQMD | | 699.835 | 4 | 2796.317 | 2796.316 | 0 | 0.3 | 4313 | 327.4 | 327.4 | 1327.4 | 5.35 |
| | RYLVYGDEYK.A | | | | | | | | | | | | |
| 1880 | K.QQGLRQDHPGQMD | | 699.835 | 4 | 2796.317 | 2796.316 | 0 | 0.5 | 4313 | 325.8 | 325.8 | 325.8 | 5.35 |
| | RYLVYGDEYK.A | | | | | | | | | | | | |
| 1544 | K.QQGLRQDHPGQM | M[+16] | 563.268 | 5 | 2812.309 | 2812.311 | 0 | 0.5 | 4313 | 309.5 | 309.5 | 309.5 | 4.56 |
| | [+15.995]DRYLV | | | | | | | | | | | | |
| | YGDEYK.A | | | | | | | | | | | | |
| 3802 | R.QDHPGQMDRYLVY | | 511.648 | 5 | 2554.211 | 2554.214 | 0 | −1.2 | 4318 | 365.7 | 365.7 | 365.7 | 16.26 |
| | GDEYKALR.D | | | | | | | | | | | | |
| 3802 | R.QDHPGQMDRYLVY | | 511.649 | 5 | 2554.214 | 2554.214 | 0 | −0.3 | 4318 | 340.5 | 340.5 | 340.5 | 5.58 |
| | GDEYKALR.D | | | | | | | | | | | | |
| 816 | R.QDHPGQMDRYLVY | | 738.669 | 3 | 2213.994 | 2213.992 | 0 | 0.7 | 4318 | 308.1 | 308.1 | 308.1 | 5.42 |
| | GDEYK.A | | | | | | | | | | | | |
| 970 | R.YLVYGDEYKALRD | | 987.521 | 2 | 1974.034 | 1974.033 | 0 | 0.3 | 4327 | 515.0 | 515.0 | 515.0 | 7.03 |
| | AVAK.A | | | | | | | | | | | | |
| 1785 | R.YLVYGDEYK.A | | 575.277 | 2 | 1149.546 | 1149.546 | 0 | −0.1 | 4327 | 472.1 | 472.1 | 472.1 | 7.10 |
| 844 | R.YLVYGDEYKALR. | | 745.388 | 2 | 1489.768 | 1489.769 | 0 | −0.3 | 4327 | 465.3 | 465.3 | 465.3 | 6.67 |
| | D | | | | | | | | | | | | |
| 1785 | R.YLVYGDEYK.A | | 575.277 | 2 | 1149.546 | 1149.546 | 0 | 0.5 | 4327 | 437.6 | 437.6 | 437.6 | 6.28 |
| 970 | R.YLVYGDEYKALRD | | 494.264 | 4 | 1974.034 | 1974.033 | 0 | 0.7 | 4327 | 408.1 | 408.1 | 408.1 | 8.06 |
| | AVAK.A | | | | | | | | | | | | |
| 970 | R.YLVYGDEYKALRD | | 658.683 | 3 | 1974.034 | 1974.033 | 0 | 0.3 | 4327 | 391.3 | 391.3 | 391.3 | 6.97 |
| | AVAK.A | | | | | | | | | | | | |
| 1785 | R.YLVYGDEYK.A | | 575.277 | 2 | 1149.546 | 1149.546 | 0 | −0.2 | 4327 | 385.8 | 385.8 | 385.8 | 6.72 |
| 970 | R.YLVYGDEYKALRD | | 658.683 | 3 | 1974.034 | 1974.033 | 0 | 0.4 | 4327 | 369.6 | 369.6 | 369.6 | 6.74 |
| | AVAK.A | | | | | | | | | | | | |
| 970 | R.YLVYGDEYKALRD | | 494.264 | 4 | 1974.033 | 1974.033 | 0 | 0.0 | 4327 | 367.5 | 367.5 | 367.5 | 6.97 |
| | AVAK.A | | | | | | | | | | | | |
| 1785 | R.YLVYGDEYK.A | | 575.277 | 2 | 1149.546 | 1149.546 | 0 | −0.5 | 4327 | 330.7 | 330.7 | 330.7 | 14.62 |
| 1726 | K.AVLEC | C[+57] | 614.360 | 2 | 1227.713 | 1227.713 | 0 | 0.0 | 4344 | 589.5 | 589.5 | 589.5 | 8.86 |
| | [+57.021] | | | | | | | | | | | | |
| | KPLGIK.T | | | | | | | | | | | | |
| 1726 | K.AVLEC | C[+57] | 409.909 | 3 | 1227.713 | 1227.713 | 0 | 0.2 | 4344 | 584.6 | 584.6 | 584.6 | 9.59 |
| | [+57.021] | | | | | | | | | | | | |
| | KPLGIK.T | | | | | | | | | | | | |
| 1194 | K.TPQSQQSAYFLLT | | 950.503 | 2 | 1899.999 | 1899.996 | 0 | 1.4 | 4362 | 598.1 | 598.1 | 598.1 | 9.96 |
| | LFR.E | | | | | | | | | | | | |
| 1194 | K.TPQSQQSAYFLLT | | 634.004 | 3 | 1899.998 | 1899.996 | 0 | 0.8 | 4362 | 383.2 | 383.2 | 383.2 | 6.88 |
| | LFR.E | | | | | | | | | | | | |
| 1194 | K.TPQSQQSAYFLLT | | 634.005 | 3 | 1899.999 | 1899.996 | 0 | 1.5 | 4362 | 357.0 | 324.2 | 324.2 | 5.49 |
| | LFR.E | | | | | | | | | | | | |
| 1878 | R.EVAILYR.S | | 432.253 | 2 | 863.498 | 863.499 | 0 | −0.2 | 4378 | 426.7 | 426.7 | 426.7 | 6.99 |
| 1685 | R.SHNASLHPTPEQC | C[+57] | 664.646 | 3 | 1991.924 | 1991.924 | 0 | 0.1 | 4385 | 809.9 | 1809.9 | 809.9 | 14.95 |
| | [+57.021]EAVSK. | | | | | | | | | | | | |
| | F | | | | | | | | | | | | |
| 1685 | R.SHNASLHPTPEQC | C[+57] | 498.737 | 4 | 1991.924 | 1991.924 | 0 | 0.1 | 4385 | 457.8 | 457.8 | 457.8 | 17.94 |
| | [+57.021]EAVSK. | | | | | | | | | | | | |
| | F | | | | | | | | | | | | |
| 1685 | R.SHNASLHPTPEQC | C[+57] | 498.737 | 4 | 1991.924 | 1991.924 | 0 | 0.0 | 4385 | 365.5 | 365.5 | 365.5 | 7.47 |
| | [+57.021]EAVSK. | | | | | | | | | | | | |
| | F | | | | | | | | | | | | |
| 1759 | K.ILSPPDISR.F | | 499.287 | 2 | 997.568 | 997.568 | 0 | −0.1 | 4409 | 457.8 | 457.8 | 457.8 | 17.10 |
| 1759 | K.ILSPPDISR.F | | 997.567 | 1 | 997.567 | 997.568 | 0 | 0.4 | 4409 | 442.2 | 442.2 | 442.2 | 6.23 |
| 1759 | K.ILSPPDISR.F | | 499.288 | 2 | 997.568 | 997.568 | 0 | 0.1 | 4409 | 400.9 | 400.9 | 400.9 | 6.83 |
| 1759 | K.ILSPPDISR.F | | 499.288 | 2 | 997.568 | 997.568 | 0 | 0.1 | 4409 | 398.4 | 398.4 | 398.4 | 6.72 |
| 1759 | K.ILSPPDISR.F | | 499.288 | 2 | 997.568 | 997.568 | 0 | 0.1 | 4409 | 396.3 | 396.3 | 396.3 | 6.87 |
| 1782 | K.ILSPPDISRFATS | | 837.471 | 3 | 2510.397 | 2510.398 | 0 | −0.3 | 4409 | 383.4 | 383.4 | 383.4 | 7.28 |
| | LVDNSVPLLR.A | | | | | | | | | | | | |
| 1759 | K.ILSPPDISR.F | | 499.288 | 2 | 997.568 | 997.568 | 0 | 0.1 | 4409 | 382.8 | 1382.8 | 382.8 | 6.72 |
| 1759 | K.ILSPPDISR.F | | 499.287 | 2 | 997.568 | 997.568 | | 0.1 | 4409 | 332.7 | 332.7 | 332.7 | 5.33 |
| 1759 | K.ILSPPDISR.F | | 499.288 | 2 | 997.568 | 997.568 | 0 | 0.3 | 4409 | 327.7 | 327.7 | 327.7 | 15.33 |
| 1759 | K.ILSPPDISR.F | | 499.288 | 2 | 997.568 | 997.568 | 0 | 0.1 | 4409 | 309.1 | 309.1 | 309.1 | 5.24 |
| 887 | R.FATSLVDNSVPLL | | 766.427 | 2 | 1531.848 | 1531.848 | 0 | −0.3 | 4418 | 654.4 | 654.4 | 654.4 | 11.26 |
| | R.A | | | | | | | | | | | | |
| 887 | R.FATSLVDNSVPLL | | 766.428 | 2 | 1531.848 | 1531.848 | 0 | 0.0 | 4418 | 597.1 | 597.1 | 597.1 | 9.96 |
| | R.A | | | | | | | | | | | | |
| 887 | R.FATSLVDNSVPLL | | 766.427 | 2 | 1531.847 | 1531.848 | 0 | −0.3 | 4418 | 585.5 | 585.5 | 585.5 | 9.26 |
| | R.A | | | | | | | | | | | | |
| 887 | R.FATSLVDNSVPLL | | 766.427 | 2 | 1531.848 | 1531.848 | 0 | −0.3 | 4418 | 511.0 | 511.0 | 511.0 | 8.21 |
| | R.A | | | | | | | | | | | | |
| 887 | R.FATSLVDNSVPLL | | 511.287 | 3 | 1531.847 | 1531.848 | 0 | −0.4 | 4418 | 454.8 | 454.8 | 454.8 | 6.64 |
| | R.A | | | | | | | | | | | | |
| 1485 | R.FATSLVDN | N[+1] | 766.920 | 2 | 1532.832 | 1532.832 | 0 | 0.2 | 4418 | 438.4 | 438.4 | 438.4 | 17.59 |
| | [+0.984]S | | | | | | | | | | | | |
| | VPLLR.A | | | | | | | | | | | | |
| 887 | R.FATSLVDNSVPLL | | 511.288 | 3 | 1531.848 | 1531.848 | 0 | 0.2 | 4418 | 434.1 | 434.1 | 434.1 | 7.96 |
| | R.A | | | | | | | | | | | | |
| 1485 | R.FATSLVDN | N[+1] | 511.616 | 3 | 1532.832 | 1532.832 | 0 | 0.1 | 4418 | 431.6 | 431.6 | 431.6 | 7.24 |
| | [+0.984]SVPL | | | | | | | | | | | | |
| | LR.A | | | | | | | | | | | | |
| 1485 | R.FATSLVDN | N[+1] | 766.920 | 2 | 1532.833 | 1532.832 | 0 | 0.4 | 4418 | 422.3 | 422.3 | 422.3 | 8.56 |
| | [+0.984]SVPL | | | | | | | | | | | | |
| | LR.A | | | | | | | | | | | | |
| 887 | R.FATSLVDNSVPLL | | 766.428 | 2 | 1531.848 | 1531.848 | 0 | 0.0 | 4418 | 398.6 | 398.6 | 398.6 | 7.72 |
| | R.A | | | | | | | | | | | | |
| 1485 | R.FATSLVDN | N[+1] | 766.919 | 2 | 1532.831 | 1532.832 | 0 | −0.5 | 4418 | 386.6 | 386.6 | 386.6 | 7.01 |
| | [+0.984]SVPL | | | | | | | | | | | | |
| | LR.A | | | | | | | | | | | | |
| 1098 | K.NLAFSPATMAHAF | | 938.477 | 3 | 2813.417 | 2813.411 | 0 | 1.8 | 4467 | 836.3 | 836.3 | 836.3 | 14.57 |
| | LPTMPEDLLAQAR.R | | | | | | | | | | | | |
| 1098 | K.NLAFSPATMAHAF | | 938.476 | 3 | 2813.413 | 2813.411 | 0 | 0.5 | 4467 | 686.0 | 686.0 | 686.0 | 11.58 |
| | LPTMPEDLLAQAR.R | | | | | | | | | | | | |
| 1098 | K.NLAFSPATMAHAF | | 704.109 | QTQN4 | 2813.414 | 2813.411 | 0 | 0.9 | 4467 | 581.3 | 581.3 | 581.3 | 8.98 |
| | LPTMPEDLLAQAR.R | | | | | | | | | | | | |
| 941 | K.NLAFSPATMAHAF | | 990.509 | 3 | 2969.514 | 2969.512 | 0 | 0.4 | 4467 | 572.9 | 572.9 | 572.9 | 8.66 |
| | LPTMPEDLLAQARR. | | | | | | | | | | | | |
| | W | | | | | | | | | | | | |
| 1098 | K.NLAFSPATMAHAF | | 1407.212 | 2 | 2813.416 | 2813.411 | 0 | 1.5 | 4467 | 568.7 | 568.7 | 568.7 | 9.58 |
| | LPTMPEDLLAQAR.R | | | | | | | | | | | | |
| 941 | K.NLAFSPATMAHAF | | 743.135 | 4 | 2969.516 | 2969.512 | 0 | 1.2 | 4467 | 476.4 | 464.3 | 464.3 | 7.36 |
| | LPTMPEDLLAQARR. | | | | | | | | | | | | |
| | W | | | | | | | | | | | | |
| 1639 | K.NLAFSPATM | M[+16] | 943.808 | 3 | 2829.410 | 2829.406 | 0 | 1.3 | 4467 | 433.0 | 433.0 | 164.1 | 6.97 |
| | [+15.995]AH | | | | | | | | | | | | |
| | AFLPTMPE | | | | | | | | | | | | |
| | DLLAQAR.R | | | | | | | | | | | | |
| 1303 | R.DGFHLVKDKADR. | | 467.581 | 3 | 1400.728 | 1400.728 | 0 | −0.2 | 4541 | 683.4 | 683.4 | 683.4 | 9.71 |
| | T | | | | | | | | | | | | |
| 2683 | K.ADRTQTGHVLGNP | | 452.243 | 4 | 1805.948 | 1805.948 | 0 | 0.1 | 4550 | 458.5 | 412.0 | 412.0 | 7.20 |
| | QRR.D | | | | | | | | | | | | |
| 2009 | R.TQTGHVLGNPQRR | | 488.599 | 3 | 1463.783 | 1463.783 | 0 | 0.5 | 4553 | 457.8 | 429.7 | 429.7 | 7.13 |
| | .D | | | | | | | | | | | | |
| 4638 | R.TQTGHVLGNPQR. | | 436.566 | 3 | 1307.683 | 1307.682 | 0 | 1.3 | 4553 | 340.8 | 340.8 | 340.8 | 5.71 |
| | R | | | | | | | | | | | | |
| 886 | K.GFLQQHILKDLEQ | | 627.692 | 3 | 1881.061 | 1881.059 | 0 | 0.9 | 4614 | 656.1 | 656.1 | 656.1 | 11.77 |
| | LAK.M | | | | | | | | | | | | |
| 886 | K.GFLQQHILKDLEQ | | 941.033 | 2 | 1881.059 | 1881.059 | 0 | 0.0 | 4614 | 599.5 | 599.5 | 599.5 | 8.39 |
| | LAK.M | | | | | | | | | | | | |
| 886 | K.GFLQQHILKDLEQ | | 471.020 | 4 | 1881.060 | 1881.059 | 0 | 0.4 | 4614 | 490.3 | 490.3 | 490.3 | 8.72 |
| | LAK.M | | | | | | | | | | | | |
| 886 | K.GFLQQHILKDLEQ | | 627.691 | 3 | 1881.059 | 1881.059 | 0 | 0.1 | 4614 | 363.7 | 363.7 | 363.7 | 7.53 |
| | LAK.M | | | | | | | | | | | | |
| 1043 | K.MLGHSADETIGVV | | 487.518 | 4 | 1947.049 | 1947.048 | 0 | 0.4 | 4630 | 743.0 | 743.0 | 743.0 | 12.96 |
| | HLVLR.R | | | | | | | | | | | | |
| 1043 | K.MLGHSADETIGVV | | 649.688 | 3 | 1947.049 | 1947.048 | 0 | 0.7 | 4630 | 708.8 | 708.8 | 708.8 | 12.96 |
| | HLVLR.R | | | | | | | | | | | | |
| 819 | K.MLGHSADETIGVV | | 526.543 | 4 | 2103.150 | 2103.149 | 0 | 0.2 | 4630 | 617.1 | 617.1 | 617.1 | 10.77 |
| | HLVLRR.L | | | | | | | | | | | | |
| 819 | K.MLGHSADETIGVV | | 421.436 | 5 | 2103.149 | 2103.149 | 0 | 0.0 | 4630 | 561.1 | 561.1 | 561.1 | 9.77 |
| | HLVLRR.L | | | | | | | | | | | | |
| 1043 | K.MLGHSADETIGVV | | 487.518 | 4 | 1947.048 | 1947.048 | 0 | 0.0 | 4630 | 551.6 | 551.6 | 551.6 | 9.12 |
| | HLVLR.R | | | | | | | | | | | | |
| 1625 | K.M[+15.995]LGH | M[+16] | 424.635 | 5 | 2119.145 | 2119.144 | 0 | 0.3 | 4630 | 508.9 | 508.9 | 508.9 | 8.72 |
| | SADETIGVVHLVLRR | | | | | | | | | | | | |
| | .L | | | | | | | | | | | | |
| 819 | K.MLGHSADETIGVV | | 526.543 | 4 | 2103.150 | 2103.149 | 0 | 0.2 | 4630 | 417.2 | 417.2 | 417.2 | 8.37 |
| | HLVLRR.L | | | | | | | | | | | | |
| 924 | R.RLLQEQHQLSSR. | | 498.943 | 3 | 1494.814 | 1494.814 | 0 | 0.2 | 4648 | 484.6 | 484.6 | 484.6 | 8.54 |
| | R | | | | | | | | | | | | |
| 1824 | R.LLQEQHQLSSR.R | | 446.909 | 3 | 1338.712 | 1338.712 | 0 | 0.0 | 4649 | 411.5 | 411.5 | 411.5 | 7.22 |
| 1111 | R.RLLNFDTELSTKE | | 618.324 | 3 | 1852.959 | 1852.959 | 0 | 0.0 | 4660 | 755.7 | 755.7 | 755.7 | 13.77 |
| | MR.N | | | | | | | | | | | | |
| 1111 | R.RLLNFDTELSTKE | | 463.995 | 4 | 1852.958 | 1852.959 | 0 | 0.4 | 4660 | 612.9 | 612.9 | 612.9 | 10.06 |
| | MR.N | | | | | | | | | | | | |
| 906 | R.RLLNFDTELSTK. | | 718.891 | 2 | 1436.775 | 1436.774 | 0 | 0.1 | 4660 | 599.6 | 599.6 | 599.6 | 9.59 |
| | E | | | | | | | | | | | | |
| 1111 | R.RLLNFDTELSTKE | | 463.995 | 4 | 1852.959 | 1852.959 | 0 | 0.2 | 4660 | 590.6 | 590.6 | 590.6 | 9.77 |
| | MR.N | | | | | | | | | | | | |
| 4639 | R.RLLNFDTELSTKE | M[+16] | 623.656 | 3 | 1868.954 | 1868.954 | 0 | 0.2 | 4660 | 551.9 | 1551.9 | 551.9 | 8.93 |
| | M[+15.995]R.N | | | | | | | | | | | | |
| 906 | R.RLLNFDTELSTK. | | 718.891 | 2 | 1436.775 | 1436.774 | 0 | 0.2 | 4660 | 545.1 | 545.1 | 545.1 | 8.02 |
| | E | | | | | | | | | | | | |
| 906 | R.RLLNFDTELSTK. | | 479.596 | 3 | 1436.774 | 1436.774 | 0 | −0.3 | 4660 | 509.6 | 509.6 | 509.6 | 7.83 |
| | E | | | | | | | | | | | | |
| 906 | R.RLLNFDTELSTK. | | 479.596 | 3 | 1436.774 | 1436.774 | 0 | 0.2 | 4660 | 501.4 | 501.4 | 501.4 | 8.54 |
| | E | | | | | | | | | | | | |
| 906 | R.RLLNFDTELSTK. | | 479.596 | 3 | 1436.774 | 1436.774 | 0 | 0.1 | 4660 | 446.7 | 446.7 | 446.7 | 7.57 |
| | E | | | | | | | | | | | | |
| 906 | R.RLLNFDTELSTK. | | 479.596 | 3 | 1436.774 | 1436.774 | 0 | −0.3 | 4660 | 424.1 | 419.5 | 419.5 | 6.75 |
| | E | | | | | | | | | | | | |
| 906 | R.RLLNFDTELSTK. | | 479.596 | 3 | 1436.774 | 1436.774 | 0 | −0.1 | 4660 | 412.0 | 412.0 | 412.0 | 6.99 |
| | E | | | | | | | | | | | | |
| 906 | R.RLLNFDTELSTK. | | 479.596 | 3 | 1436.774 | 1436.774 | 0 | 0.2 | 4660 | 399.6 | 399.6 | 399.6 | 6.87 |
| | E | | | | | | | | | | | | |
| 906 | R.RLLNFDTELSTK. | | 479.596 | 3 | 1436.774 | 1436.774 | 0 | 0.0 | 4660 | 378.3 | 378.3 | 378.3 | 7.10 |
| | E | | | | | | | | | | | | |
| 906 | R.RLLNFDTELSTK. | | 718.891 | 2 | 1436.775 | 1436.774 | 0 | 0.2 | 4660 | 324.8 | 324.8 | 324.8 | 5.33 |
| | E | | | | | | | | | | | | |
| 1111 | R.RLLNFDTELSTKE | | 618.324 | 3 | 1852.958 | 1852.959 | 0 | −0.4 | 4660 | 312.1 | 312.1 | 312.1 | 4.87 |
| | MR.N | | | | | | | | | | | | |
| 1533 | R.LLNFDTELSTKEM | M[+16] | 571.622 | 3 | 1712.853 | 1712.852 | 0 | 0.1 | 4661 | 559.8 | 559.8 | 559.8 | 8.20 |
| | [+15.995]R.N | | | | | | | | | | | | |
| 821 | R.LLNFDTELSTK.E | | 640.840 | 2 | 1280.673 | 1280.673 | 0 | 0.0 | 4661 | 540.0 | 1539.2 | 539.2 | 8.02 |
| 821 | R.LLNFDTELSTK.E | | 640.840 | 2 | 1280.674 | 1280.673 | 0 | 0.2 | 4661 | 526.2 | 483.0 | 483.0 | 8.02 |
| 1533 | R.LLNFDTELSTKEM | M[+16] | 856.930 | 2 | 1712.852 | 1712.852 | 0 | −0.2 | 4661 | 517.6 | 517.6 | 517.6 | 8.72 |
| | [+15.995]R.N | | | | | | | | | | | | |
| 821 | R.LLNFDTELSTK.E | | 640.841 | 2 | 1280.674 | 1280.673 | 0 | 0.4 | 4661 | 503.3 | 503.3 | 503.3 | 7.57 |
| 873 | R.LLNFDTELSTKEM | | 566.291 | 3 | 1696.857 | 1696.857 | 0 | −0.2 | 4661 | 500.2 | 500.2 | 500.2 | 8.72 |
| | R.N | | | | | | | | | | | | |
| 821 | R.LLNFDTELSTK.E | | 640.840 | 2 | 1280.673 | 1280.673 | 0 | 0.0 | 4661 | 481.4 | 349.9 | 349.9 | 6.29 |
| 821 | R.LLNFDTELSTK.E | | 640.841 | 2 | 1280.674 | 1280.673 | 0 | 0.6 | 4661 | 474.2 | 474.2 | 474.2 | 7.33 |
| 821 | R.LLNFDTELSTK.E | | 640.840 | 2 | 1280.673 | 1280.673 | 0 | −0.2 | 4661 | 457.6 | 332.5 | 332.5 | 6.04 |
| 821 | R.LLNFDTELSTK.E | | 640.840 | 2 | 1280.673 | 1280.673 | 0 | 0.0 | 4661 | 456.9 | 456.9 | 456.9 | 7.57 |
| 1533 | R.LLNFDTELSTKEM | M[+16] | 571.622 | 3 | 1712.853 | 1712.852 | 0 | 0.2 | 4661 | 407.6 | 407.6 | 407.6 | 7.17 |
| | [+15.995]R.N | | | | | | | | | | | | |
| 821 | R.LLNFDTELSTK.E | | 640.841 | 2 | 1280.674 | 1280.673 | 0 | 0.4 | 4661 | 364.2 | 360.1 | 360.1 | 6.87 |
| 821 | R.LLNFDTELSTK.E | | 640.836 | 2 | 1280.665 | 1280.673 | 0 | −6.8 | 4661 | 342.1 | 342.1 | 342.1 | 4.08 |
| 821 | R.LLNFDTELSTK.E | | 640.841 | 2 | 1280.674 | 1280.673 | 0 | 0.8 | 4661 | 308.6 | 249.1 | 249.1 | 5.54 |
| 1321 | R.NNWEKEIAAVISP | | 779.069 | 3 | 2335.193 | 2335.193 | 0 | 0.1 | 4675 | 670.4 | 670.4 | 670.4 | 11.77 |
| | ELEHLDK.T | | | | | | | | | | | | |
| 1014 | R.NNWEKEIAAVISP | | 758.992 | 5 | 3790.932 | 3790.932 | 0 | −0.1 | 4675 | 610.7 | 610.7 | 610.7 | 10.08 |
| | ELEHLDKTLPTMNNL | | | | | | | | | | | | |
| | ISQDK.R | | | | | | | | | | | | |
| 1498 | R.N[+0.984]NWEK | N[+1] | 584.800 | 4 | 2336.178 | 2336.177 | 0 | 0.4 | 4675 | 541.0 | 541.0 | 0.0 | 8.93 |
| | EIAAVISPELEHLDK | | | | | | | | | | | | |
| | .T | | | | | | | | | | | | |
| 1498 | R.N[+0.984]NWEK | N[+1] | 779.397 | 3 | 2336.178 | 2336.177 | 0 | 0.3 | 4675 | 487.0 | 487.0 | 10.8 | 7.75 |
| | EIAAVISPELEHLDK | | | | | | | | | | | | |
| | .T | | | | | | | | | | | | |
| 1055 | K.EIAAVISPELEHL | | 1092.581 | 3 | 3275.730 | 3275.730 | 0 | −0.2 | 4680 | 628.4 | 628.4 | 628.4 | 8.70 |
| | DKTLPTMNNLISQDK | | | | | | | | | | | | |
| | R.I | | | | | | | | | | | | |
| 1597 | K.EIAAVISPELEHL | M[+16] | 823.937 | 4 | 3292.726 | 3291.725 | 1 | 0.9 | 4680 | 560.6 | 413.9 | 349.3 | 7.40 |
| | DKTLPTM | | | | | | | | | | | | |
| | [+15.995]NNLIS | | | | | | | | | | | | |
| | QDKR.I | | | | | | | | | | | | |
| 933 | K.EIAAVISPELEHL | | 832.449 | 2 | 1663.890 | 1663.890 | 0 | 0.0 | 4680 | 504.7 | 504.7 | 504.7 | 18.91 |
| | DK.T | | | | | | | | | | | | |
| 1055 | K.EIAAVISPELEHL | | 819.688 | 4 | 3275.730 | 3275.730 | 0 | −0.2 | 4680 | 500.4 | 500.4 | 500.4 | 8.03 |
| | DKTLPTMNNLISQDK | | | | | | | | | | | | |
| | R.I | | | | | | | | | | | | |
| 1055 | K.EIAAVISPELEHL | | 1093.248 | 3 | 3277.730 | 3275.730 | 2 | −2.1 | 4680 | 393.1 | 393.1 | 148.5 | 4.27 |
| | DKTLPTMNNLISQDK | | | | | | | | | | | | |
| | R.I | | | | | | | | | | | | |
| 933 | K.EIAAVISPELEHL | | 555.636 | 3 | 1664.893 | 1663.890 | 1 | −0.6 | 4680 | 388.8 | 388.8 | 388.8 | 6.77 |
| | DK.T | | | | | | | | | | | | |
| 1597 | K.EIAAVISPELEHL | M[+16] | 549.623 | 6 | 3292.701 | 3291.725 | 1 | −8.6 | 4680 | 313.1 | 313.1 | 186.0 | 2.71 |
| | DKTLPTM | | | | | | | | | | | | |
| | [+15.995]NN | | | | | | | | | | | | |
| | LISQDKR.I | | | | | | | | | | | | |
| 882 | K.TLPTMNNLISQDK | | 815.933 | 2 | 1630.859 | 1630.858 | 0 | 0.5 | 4695 | 521.1 | 521.1 | 521.1 | 8.20 |
| | R.I | | | | | | | | | | | | |
| 882 | K.TLPTMNNLISQDK | | 815.933 | | 1630.859 | 1630.858 | 0 | 0.3 | 4695 | 496.4 | 496.4 | 496.4 | 7.99 |
| | R.I | | | | | | | | | | | | |
| 1574 | K.TLPTM | M[+16] | 549.623 | 3 | 1646.854 | 1646.853 | 0 | 0.5 | 4695 | 434.5 | 434.5 | 434.5 | 7.40 |
| | [+15.995]N | | | | | | | | | | | | |
| | NLISQDKR.I | | | | | | | | | | | | |
| 1574 | K.TLPTM | M[+16] | 549.622 | 3 | 1646.853 | 1646.853 | 0 | −0.2 | 4695 | 406.1 | 406.1 | 406.1 | 7.40 |
| | [+15.995] | | | | | | | | | | | | |
| | NNLISQDKR.I | | | | | | | | | | | | |
| 882 | K.TLPTMNNLISQDK | | 544.291 | 3 | 1630.859 | 1630.858 | 0 | 0.3 | 4695 | 307.4 | 307.4 | 307.4 | 5.58 |
| | R.I | | | | | | | | | | | | |
| 1838 | R.ISSNPVAK.I | | 408.235 | 2 | 815.462 | 815.462 | 0 | 0.0 | 4709 | 317.0 | 317.0 | 317.0 | 5.07 |
| 1172 | K.JIYGDPVTFLPHL | | 869.487 | | 1737.967 | 1737.969 | 0 | −0.8 | 4717 | 745.9 | 745.9 | 745.9 | 12.26 |
| | PR.K | | | | | | | | | | | | |
| 1172 | K.IIYGDPVTFLPHL | | 579.994 | 3 | 1737.968 | 1737.969 | 0 | −0.2 | 4717 | 691.8 | 691.8 | 691.8 | 11.96 |
| | PR.K | | | | | | | | | | | | |
| 846 | K.IIYGDPVTFLPHL | | 467.271 | 4 | 1866.064 | 1866.064 | 0 | 0.0 | 4717 | 639.1 | 639.1 | 639.1 | 10.77 |
| | PRK.S | | | | | | | | | | | | |
| 1172 | K.JIYGDPVTFLPHL | | 579.993 | 3 | 1737.965 | 1737.969 | 0 | −1.9 | 4717 | 621.9 | 621.9 | 621.9 | 10.26 |
| | PR.K | | | | | | | | | | | | |
| 1172 | K.IIYGDPVTFLPHL | | 579.994 | 3 | 1737.968 | 1737.969 | 0 | −0.7 | 4717 | 613.2 | 613.2 | 613.2 | 10.26 |
| | PR.K | | | | | | | | | | | | |
| 846 | K.IIYGDPVTFLPHL | | 467.272 | 4 | 1866.064 | 1866.064 | 0 | 0.4 | 4717 | 608.0 | 608.0 | 608.0 | 10.77 |
| | PRK.S | | | | | | | | | | | | |
| 846 | K.IIYGDPVTFLPHL | | 467.271 | 4 | 1866.064 | 1866.064 | 0 | 0.0 | 4717 | 558.0 | 558.0 | 558.0 | 18.93 |
| | PRK.S | | | | | | | | | | | | |
| 846 | K.IIYGDPVTFLPHL | | 467.271 | 4 | 1866.064 | 1866.064 | 0 | −0.1 | 4717 | 509.1 | 463.9 | 463.9 | 8.72 |
| | PRK.S | | | | | | | | | | | | |
| 846 | K.IIYGDPVTFLPHL | | 622.693 | 3 | 1866.065 | 1866.064 | 0 | 0.6 | 4717 | 475.5 | 475.5 | 475.5 | 18.48 |
| | PRK.S | | | | | | | | | | | | |
| 1172 | K.IIYGDPVTFLPHL | | 579.994 | 3 | 1737.969 | 1737.969 | 0 | 0.0 | 4717 | 435.7 | 435.7 | 435.7 | 8.56 |
| | PR.K | | | | | | | | | | | | |
| 846 | K.IIYGDPVTFLPHL | | 622.693 | 3 | 1866.064 | 1866.064 | 0 | 0.3 | 4717 | 424.3 | 424.3 | 424.3 | 7.64 |
| | PRK.S | | | | | | | | | | | | |
| 846 | K.IIYGDPVTFLPHL | | 467.271 | 4 | 1866.064 | 1866.064 | 0 | 0.0 | 4717 | 422.8 | 422.8 | 422.8 | 18.37 |
| | PRK.S | | | | | | | | | | | | |
| 2008 | R.KRITVEYLQHIVE | | 471.773 | 4 | 1884.071 | 1884.070 | 0 | 0.2 | 4745 | 427.0 | 427.0 | 427.0 | 7.64 |
| | QK.N | | | | | | | | | | | | |
| 1159 | R.ITVEYLQHIVEQK | | 800.440 | 2 | 1599.874 | 1599.874 | 0 | −0.4 | 4747 | 679.3 | 679.3 | 679.3 | 10.88 |
| | .N | | | | | | | | | | | | |
| 1159 | R.ITVEYLQHIVEQK | | 800.441 | 2 | 1599.875 | 1599.874 | 0 | 0.4 | 4747 | 644.2 | 481.6 | 481.6 | 10.59 |
| | .N | | | | | | | | | | | | |
| 1159 | R.ITVEYLQHIVEQK | | 800.441 | 2 | 1599.874 | 1599.874 | 0 | 0.1 | 4747 | 573.2 | 550.4 | 550.4 | 9.59 |
| | .N | | | | | | | | | | | | |
| 1512 | R.ITVEYLQHIVEQK | N[+1] | 547.045 | 4 | 2185.160 | 2185.161 | 0 | 0.6 | 4747 | 486.9 | 486.9 | 472.3 | 7.70 |
| | N[+0.984]GKER.V | | | | | | | | | | | | |
| 4640 | K.NGKERVPILWHFL | | 467.270 | 4 | 1866.057 | 1865.054 | 1 | 0.2 | 4760 | 320.0 | 320.0 | 320.0 | 5.20 |
| | QK.E | | | | | | | | | | | | |
| 879 | R.VPILWHFLQKEAE | | 470.520 | 4 | 1879.060 | 1879.059 | 0 | 0.4 | 4765 | 480.5 | 480.5 | 480.5 | 8.72 |
| | LR.L | | | | | | | | | | | | |
| 863 | R.VPILWHFLQK.E | | 427.589 | 3 | 1280.752 | 1280.751 | 0 | 0.2 | 4765 | 423.1 | 423.1 | 423.1 | 7.22 |
| 4641 | R.LVKFLPEILALQR | | 513.992 | 3 | 1539.962 | 1539.962 | 0 | 0.1 | 4780 | 451.4 | 451.4 | 451.4 | 7.38 |
| | .D | | | | | | | | | | | | |
| 853 | K.FLPEILALQR.D | | 600.361 | 2 | 1199.714 | 1199.715 | 0 | 0.5 | 4783 | 495.6 | 495.6 | 495.6 | 6.86 |
| 853 | K.FLPEILALQR.D | | 600.361 | 2 | 1199.715 | 1199.715 | 0 | 0.2 | 4783 | 462.2 | 462.2 | 462.2 | 7.33 |
| 1390 | R.DLVKQFQNVQQVE | | 905.149 | 3 | 2713.432 | 2713.431 | 0 | 0.4 | 4793 | 732.7 | 732.7 | 1732.7 | 12.46 |
| | YSSIRGFLSK.H | | | | | | | | | | | | |
| 1019 | R.DLVKQFQNVQQVE | | 1091.069 | 2 | 2181.131 | 2181.130 | 0 | 0.6 | 4793 | 632.5 | 548.9 | 548.9 | 10.77 |
| | YSSIR.G | | | | | | | | | | | | |
| 1019 | R.DLVKQFQNVQQVE | | 727.715 | 3 | 2181.132 | 2181.130 | 0 | 0.8 | 4793 | 541.7 | 541.7 | 541.7 | 8.93 |
| | YSSIR.G | | | | | | | | | | | | |
| 1019 | R.DLVKQFQNVQQVE | | 727.715 | 3 | 2181.132 | 2181.130 | 0 | 0.8 | 4793 | 537.9 | 537.9 | 537.9 | 18.93 |
| | YSSIR.G | | | | | | | | | | | | |
| 818 | K.QFQNVQQVEYSSI | | 863.431 | 2 | 1725.855 | 1725.856 | 0 | −0.5 | 4797 | 676.2 | 676.2 | 676.2 | 11.26 |
| | R.G | | | | | | | | | | | | |
| 1050 | K.QFQNVQQVEYSSI | | 753.391 | 3 | 2258.157 | 2258.156 | 0 | 0.4 | 4797 | 552.6 | 552.6 | 552.6 | 18.20 |
| | RGFLSK.H | | | | | | | | | | | | |
| 818 | K.QFQNVQQVEYSSI | | 575.957 | 3 | 1725.856 | 1725.856 | 0 | 0.1 | 4797 | 475.3 | 475.3 | 475.3 | 7.34 |
| | R.G | | | | | | | | | | | | |
| 925 | R.ITVFLSTWNK.L | | 604.837 | 2. | 1208.667 | 1208.667 | 0 | −0.3 | 4829 | 507.2 | 292.3 | 292.3 | 6.38 |
| 1720 | R.SLETNGEINLPKD | C[+57] | 1204.255 | 3 | 3610.751 | 3610.747 | 0 | 1.2 | 4842 | 695.5 | 695.5 | 695.5 | 11.39 |
| | YC[+57.021]STDL | | | | | | | | | | | | |
| | DLDTEFEILLPR.R | | | | | | | | | | | | |
| 1720 | R.SLETNGEINLPKD | C[+57] | 903.443 | 4 | 3610.752 | 3610.747 | 0 | 1.3 | 4842 | 622.6 | 575.7 | 575.7 | 8.82 |
| | YC[+57.021]STDL | | | | | | | | | | | | |
| | DLDTEFEILLPR.R | | | | | | | | | | | | |
| 1146 | R.SLETNGEINLPK. | | 657.849 | 2 | 1314.690 | 1314.690 | 0 | 0.0 | 4842 | 599.7 | 599.7 | 599.7 | 9.59 |
| | D | | | | | | | | | | | | |
| 1715 | R.GLGLC | C[+57] | 803.954 | 2 | 1606.900 | 1606.899 | 0 | 0.9 | 4875 | 496.0 | 496.0 | 496.0 | 8.91 |
| | [+57.021] | | | | | | | | | | | | |
| | ATALVSYLIR.L | | | | | | | | | | | | |
| 1715 | R.GLGLC[+57.021 | C[+57] | 536.305 | 3 | 1606.899 | 1606.899 | 0 | 0.5 | 4875 | 481.3 | 481.3 | 481.3 | 7.59 |
| | ]ATALVSYLIR.L | | | | | | | | | | | | |
| 1246 | R.LHNEIVYAVEK.L | | 657.856 | 2 | 1314.705 | 1314.705 | 0 | −0.4 | 4890 | 651.9 | 651.9 | 651.9 | 10.16 |
| 1246 | R.LHNEIVYAVEK.L | | 438.907 | 3 | 1314.705 | 1314.705 | 0 | 0.1 | 4890 | 451.2 | 451.2 | 451.2 | 7.57 |
| 1819 | R.LHNEIVYAVEKLS | | 411.485 | 4 | 1642.916 | 1642.916 | 0 | 0.1 | 4890 | 451.1 | 451.1 | 451.1 | 8.48 |
| | K.E | | | | | | | | | | | | |
| 1246 | R.LHNEIVYAVEK.L | | 438.907 | 3 | 1314.705 | 1314.705 | 0 | −0.2 | 4890 | 443.6 | 443.6 | 443.6 | 7.10 |
| 900 | R.ETVQEFDLEK.I | | 619.301 | 2 | 1237.595 | 1237.595 | 0 | 0.2 | 4946 | 511.6 | 511.6 | 511.6 | 17.81 |
| 4342 | R.ETVQEFDLEKIQR | | 817.923 | 2 | 1634.839 | 1634.838 | 0 | 0.2 | 4946 | 331.3 | 331.3 | 331.3 | 5.52 |
| | .Q | | | | | | | | | | | | |
| 1004 | R.LSLKGIPTLVYR. | | 680.422 | 2 | 1359.836 | 1359.836 | 0 | 0.2 | 4971 | 633.4 | 633.4 | 633.4 | 9.67 |
| | H | | | | | | | | | | | | |
| 1004 | R.LSLKGIPTLVYR. | | 453.950 | 3 | 1359.836 | 1359.836 | 0 | 0.1 | 4971 | 559.8 | 559.8 | 559.8 | 18.56 |
| | H | | | | | | | | | | | | |
| 1004 | R.LSLKGIPTLVYR. | | 453.950 | 3 | 1359.836 | 1359.836 | 0 | 0.1 | 4971 | 542.8 | 542.8 | 542.8 | 17.83 |
| | H | | | | | | | | | | | | |
| 1912 | K.GIPTLVYR.H | | 459.774 | 2 | 918.541 | 918.541 | 0 | 0.0 | 4975 | 370.4 | 370.4 | 370.4 | 6.72 |
| 1611 | R.HDWNYEHLFM | M[+16] | 502.236 | 4 | 2005.921 | 2005.923 | 0 | −0.6 | 4983 | 560.9 | 557.0 | 557.0 | 9.06 |
| | [+15.995] | | | | | | | | | | | | |
| | DIKNK.M | | | | | | | | | | | | |
| 966 | R.HDWNYEHLFMDIK | | 583.268 | 3 | 1747.790 | 1747.790 | 0 | 0.1 | 4983 | 543.5 | 543.5 | 543.5 | 8.02 |
| | .N | | | | | | | | | | | | |
| 966 | R.HDWNYEHLFMDIK | | 583.268 | 3 | 1747.790 | 1747.790 | 0 | 0.3 | 4983 | 510.5 | 510.5 | 510.5 | 17.81 |
| | .N | | | | | | | | | | | | |
| 1565 | R.HDWNYEHLFM | M[+16] | 588.600 | 3 | 1763.785 | 1763.785 | 0 | 0.1 | 4983 | 459.9 | 459.9 | 459.9 | 7.10 |
| | [+15.995] | | | | | | | | | | | | |
| | DIK.N | | | | | | | | | | | | |
| 966 | R.HDWNYEHLFMDIK | | 437.703 | 4 | 1747.791 | 1747.790 | 0 | 0.6 | 4983 | 402.1 | 357.8 | 357.8 | 5.93 |
| | .N | | | | | | | | | | | | |
| 966 | R.HDWNYEHLFMDIK | | 874.399 | 2 | 1747.790 | 1747.790 | 0 | 0.0 | 4983 | 369.1 | 369.1 | 369.1 | 6.69 |
| | .N | | | | | | | | | | | | |
| 1020 | K.HTIALWQFLSAHK | | 570.317 | 4 | 2278.246 | 2278.246 | 0 | 0.1 | 5074 | 695.9 | 695.9 | 695.9 | 11.77 |
| | SEQLLR.L | | | | | | | | | | | | |
| 1020 | K.HTIALWQFLSAHK | | 570.317 | 4 | 2278.246 | 2278.246 | 0 | 0.0 | 5074 | 684.3 | 1684.3 | 684.3 | 11.77 |
| | SEQLLR.L | | | | | | | | | | | | |
| 1020 | K.HTIALWQFLSAHK | | 570.317 | 4 | 2278.246 | 2278.246 | 0 | 0.0 | 5074 | 592.4 | 592.4 | 592.4 | 9.77 |
| | SEQLLR.L | | | | | | | | | | | | |
| 1020 | K.HTIALWQFLSAHK | | 570.317 | 4 | 2278.244 | 2278.246 | 0 | 0.5 | 5074 | 528.3 | 528.3 | 528.3 | 8.23 |
| | SEQLLR.L | | | | | | | | | | | | |
| 2095 | K.HTIALWQFLSAHK | | 517.952 | 3 | 1551.842 | 1551.843 | 0 | 0.4 | 5074 | 443.5 | 1443.5 | 443.5 | 6.86 |
| | .S | | | | | | | | | | | | |
| 2095 | K.HTIALWQFLSAHK | | 517.953 | 3 | 1551.843 | 1551.843 | 0 | −0.2 | 5074 | 400.1 | 400.1 | 400.1 | 7.22 |
| | .S | | | | | | | | | | | | |
| 903 | R.LHKEPFGEISSR. | | 467.250 | 3 | 1399.735 | 1399.733 | 0 | 1.9 | 5093 | 651.8 | 651.8 | 651.8 | 10.67 |
| | Y | | | | | | | | | | | | |
| 903 | R.LHKEPFGEISSR. | | 467.249 | 3 | 1399.733 | 1399.733 | 0 | 0.3 | 5093 | 637.8 | 637.8 | 637.8 | 9.67 |
| | Y | | | | | | | | | | | | |
| 903 | R.LHKEPFGEISSR. | | 467.250 | 3 | 1399.735 | 1399.733 | 0 | 1.8 | 5093 | 600.8 | 600.8 | 600.8 | 10.40 |
| | Y | | | | | | | | | | | | |
| 903 | R.LHKEPFGEISSR. | | 700.370 | 2 | 1399.733 | 1399.733 | 0 | 0.1 | 5093 | 591.3 | 591.3 | 591.3 | 7.29 |
| | Y | | | | | | | | | | | | |
| 903 | R.LHKEPFGEISSR. | | 467.249 | 3 | 1399.733 | 1399.733 | 0 | 0.4 | 5093 | 572.5 | 572.5 | 572.5 | 8.67 |
| | Y | | | | | | | | | | | | |
| 903 | R.LHKEPFGEISSR. | | 467.249 | 3 | 1399.733 | 1399.733 | 0 | 0.1 | 5093 | 555.2 | 555.2 | 555.2 | 7.83 |
| | Y | | | | | | | | | | | | |
| 903 | R.LHKEPFGEISSR. | | 467.249 | 3 | 1399.733 | 1399.733 | 0 | 0.1 | 5093 | 548.6 | 548.6 | 548.6 | 7.83 |
| | Y | | | | | | | | | | | | |
| 903 | R.LHKEPFGEISSR. | | 467.249 | 3 | 1399.733 | 1399.733 | 0 | −0.2 | 5093 | 513.1 | 513.1 | 513.1 | 17.38 |
| | Y | | | | | | | | | | | | |
| 903 | R.LHKEPFGEISSR. | | 467.250 | 3 | 1399.734 | 1399.733 | 0 | 1.0 | 5093 | 503.8 | 503.8 | 503.8 | 7.62 |
| | Y | | | | | | | | | | | | |
| 903 | R.LHKEPFGEISSR. | | 467.581 | 3 | 1400.729 | 1399.733 | 1 | 5.2 | 5093 | 462.8 | 393.0 | 393.0 | 4.33 |
| | Y | | | | | | | | | | | | |
| 903 | R.LHKEPFGEISSR. | | 467.249 | 3 | 1399.733 | 1399.733 | 0 | 0.2 | 5093 | 455.0 | 455.0 | 455.0 | 7.13 |
| | Y | | | | | | | | | | | | |
| 903 | R.LHKEPFGEISSR. | | 467.249 | 3 | 1399.732 | 1399.733 | 0 | −0.5 | 5093 | 429.0 | 429.0 | 429.0 | 6.32 |
| | Y | | | | | | | | | | | | |
| 903 | R.LHKEPFGEISSR. | | 467.249 | 3 | 1399.733 | 1399.733 | 0 | 0.4 | 5093 | 388.8 | 286.3 | 286.3 | 5.48 |
| | Y | | | | | | | | | | | | |
| 903 | R.LHKEPFGEISSR. | | 467.253 | 3 | 1399.743 | 1399.733 | 0 | 7.4 | 5093 | 344.7 | 287.7 | 287.7 | 3.63 |
| | Y | | | | | | | | | | | | |
| 903 | R.LHKEPFGEISSR. | | 467.249 | 3 | 1399.733 | 1399.733 | 0 | 0.4 | 5093 | 312.0 | 312.0 | 312.0 | 5.21 |
| | Y | | | | | | | | | | | | |
| 2609 | R.YKADLSPENAK.L | | 618.317 | 2 | 1235.627 | 1235.627 | 0 | 0.1 | 5105 | 456.6 | 456.6 | 456.6 | 6.90 |
| 1450 | K.LLSTFLNQTGLDA | | 958.201 | 3 | 2872.590 | 2872.589 | 0 | 0.1 | 5116 | 857.1 | 857.1 | 857.1 | 15.65 |
| | FLLELHEMIILK.L | | | | | | | | | | | | |
| 3259 | K.LLSTFLNQTGLDA | M[+16] | 722.901 | 4 | 2888.583 | 2888.584 | 0 | −0.4 | 5116 | 776.4 | 776.4 | 776.4 | 12.27 |
| | FLLELHEM | | | | | | | | | | | | |
| | [+15.995] | | | | | | | | | | | | |
| | IILK.L | | | | | | | | | | | | |
| 3259 | K.LLSTFLNQTGLDA | M[+16] | 963.534 | 3 | 2888.587 | 2888.584 | 0 | 0.9 | 5116 | 613.2 | 613.2 | 613.2 | 10.58 |
| | FLLELHEM | | | | | | | | | | | | |
| | [+15.995]IIL | | | | | | | | | | | | |
| | K.L | | | | | | | | | | | | |
| 2126 | R.FRPQWSLR.D | | 545.301 | 2 | 1089.595 | 1089.595 | 0 | −0.3 | 5152 | 429.2 | 429.2 | 429.2 | 6.12 |
| 1786 | R.FRPQWSLRDTLVS | | 752.724 | 3 | 2256.159 | 2256.159 | 0 | −0.3 | 5152 | 364.8 | 364.8 | 364.8 | 6.34 |
| | YMQTK.E | | | | | | | | | | | | |
| 1786 | R.FRPQWSLRDTLVS | | 564.795 | 4 | 2256.159 | 2256.159 | 0 | 0.2 | 5152 | 324.3 | 324.3 | 324.3 | 5.66 |
| | YMQTK.E | | | | | | | | | | | | |
| 1540 | R.DTLVSYM | M[+16] | 601.292 | 2 | 1201.577 | 1201.577 | 0 | −0.3 | 5160 | 508.8 | 508.8 | 508.8 | 7.81 |
| | [+15.995] | | | | | | | | | | | | |
| | QTK.E | | | | | | | | | | | | |
| 861 | R.DTLVSYMQTK.E | | 593.295 | 2 | 1185.582 | 1185.582 | 0 | 0.2 | 5160 | 495.0 | 495.0 | 495.0 | 17.81 |
| 861 | R.DTLVSYMQTK.E | | 593.295 | 2 | 1185.583 | 1185.582 | 0 | 0.5 | 5160 | 425.8 | 425.8 | 425.8 | 7.46 |
| 861 | R.DTLVSYMQTK.E | | 593.295 | 2 | 1185.582 | 1185.582 | 0 | 0.1 | 5160 | 412.1 | 412.1 | 412.1 | 6.99 |
| 861 | R.DTLVSYMQTK.E | | 593.295 | 2 | 1185.582 | 1185.582 | 0 | 0.4 | 5160 | 383.2 | 383.2 | 383.2 | 7.10 |
| 861 | R.DTLVSYMQTK.E | | 593.295 | 2 | 1185.582 | 1185.582 | 0 | 0.0 | 5160 | 354.7 | 354.7 | 354.7 | 15.33 |
| 1540 | R.DTLVSYM | M[+16] | 601.292 | 2 | 1201.577 | 1201.577 | 0 | 0.1 | 5160 | 315.5 | 315.5 | 315.5 | 5.40 |
| | [+15.995] | | | | | | | | | | | | |
| | QTK.E | | | | | | | | | | | | |
| 4642 | R.DT[+79.966]LV | C[+57], | 1413.672 | 3 | 4239.002 | 4238.999 | 0 | 0.8 | 5160 | 303.2 | 303.2 | 5.7 | 4.52 |
| | SYMQTKESEILPEMA | T[+80] | | | | | | | | | | | |
| | SQFPEEILLASC | | | | | | | | | | | | |
| | [+57.021]VSV | | | | | | | | | | | | |
| | WK.T | | | | | | | | | | | | |
| 4643 | K.ESEILPEMASQFP | C[+57] | 895.213 | 4 | 3577.829 | 3575.838 | 2 | −4.2 | 5170 | 318.9 | 231.4 | 231.4 | 2.89 |
| | EEILLASC | | | | | | | | | | | | |
| | [+57.021]VSVWK | | | | | | | | | | | | |
| | TAAVLK.W | | | | | | | | | | | | |
| 1144 | K.DNTVPLKLIALLA | | 1104.244 | 3 | 3310.717 | 3310.710 | 0 | 2.2 | 5226 | 800.7 | 790.3 | 790.3 | 14.39 |
| | NGEFHSGEQLGETLG | | | | | | | | | | | | |
| | MSR.A | | | | | | | | | | | | |
| 1575 | K.DNTVPLKLIALLA | M[+16] | 832.433 | 4 | 3326.711 | 3326.705 | 0 | 1.8 | 5226 | 760.5 | 760.5 | 760.5 | 13.39 |
| | NGEFHSGEQLGETLG | | | | | | | | | | | | |
| | M[+15.995]SR.A | | | | | | | | | | | | |
| 1144 | K.DNTVPLKLIALLA | | 662.949 | 5 | 3310.714 | 3310.710 | 0 | 1.3 | 5226 | 586.0 | 514.3 | 514.3 | 8.79 |
| | NGEFHSGEQLGETLG | | | | | | | | | | | | |
| | MSR.A | | | | | | | | | | | | |
| 1575 | K.DNTVPLKLIALLA | M[+16] | 832.683 | 1 | 3327.708 | 3326.705 | 1 | −0.1 | 5226 | 555.5 | 478.4 | 216.5 | 7.82 |
| | NGEFHSGEQLGETLG | | | | | | | | | | | | |
| | M[+15.995]SR.A | | | | | | | | | | | | |
| 1575 | K.DNTVPLKLIALLA | M[+16] | 1109.575 | 3 | 3326.710 | 3326.705 | 0 | 1.6 | 5226 | 523.8 | 523.8 | 523.8 | 7.58 |
| | NGEFHSGEQLGETLG | | | | | | | | | | | | |
| | M[+15.995]SR.A | | | | | | | | | | | | |
| 874 | K.LIALLANGEFHSG | | 848.764 | 3 | 2544.278 | 2543.292 | 1 | 7.1 | 5233 | 676.5 | 542.5 | 79.9 | 10.71 |
| | EQLGETLGMSR.A | | | | | | | | | | | | |
| 874 | K.LIALLANGEFHSG | | 848.435 | 3 | 2543.291 | 2543.292 | 0 | 0.3 | 5233 | 617.0 | 553.1 | 553.1 | 10.96 |
| | EQLGETLGMSR.A | | | | | | | | | | | | |
| 874 | K.LIALLANGEFHSG | | 848.429 | 3 | 2543.274 | 2543.292 | 0 | −7.4 | 5233 | 612.8 | 577.3 | 577.3 | 9.71 |
| | EQLGETLGMSR.A | | | | | | | | | | | | |
| 874 | K.LIALLANGEFHSG | | 848.435 | 3 | 2543.291 | 2543.292 | 0 | 0.3 | 5233 | 597.0 | 597.0 | 597.0 | 9.96 |
| | EQLGETLGMSR.A | | | | | | | | | | | | |
| 874 | K.LIALLANGEFHSG | | 848.436 | 3 | 2543.292 | 2543.292 | 0 | −0.2 | 5233 | 593.8 | 593.8 | 593.8 | 9.96 |
| | EQLGETLGMSR.A | | | | | | | | | | | | |
| 1515 | K.LIALLAN | N[+1] | 848.763 | 3 | 2544.276 | 2544.276 | 0 | −0.2 | 5233 | 591.1 | 558.5 | 267.7 | 9.96 |
| | [+0.984]GEFH | | | | | | | | | | | | |
| | SGEQLGETLGMSR.A | | | | | | | | | | | | |
| 874 | K.LIALLANGEFHSG | | 636.830 | 4 | 2544.297 | 2543.292 | 1 | 0.6 | 5233 | 484.3 | 484.3 | 211.3 | 8.32 |
| | EQLGETLGMSR.A | | | | | | | | | | | | |
| 874 | K.LIALLANGEFHSG | | 848.429 | 3 | 2543.273 | 2543.292 | 0 | −7.7 | 5233 | 338.9 | 338.9 | 338.9 | 4.45 |
| | EQLGETLGMSR.A | | | | | | | | | | | | |
| 852 | R.AAINKHIQTLR.D | | 422.255 | 3 | 1264.751 | 1264.748 | 0 | 1.6 | 5257 | 486.9 | 486.9 | 486.9 | 8.35 |
| 852 | R.AAINKHIQTLR.D | | 422.255 | 3 | 1264.750 | 1264.748 | 0 | 0.9 | 5257 | 436.6 | 436.6 | 436.6 | 8.00 |
| 1796 | R.AAINKHIQTLRDW | | 642.104 | 4 | 2565.394 | 2565.394 | 0 | 0.3 | 5257 | 408.1 | 408.1 | 408.1 | 7.09 |
| | GVDVFTVPGK.G | | | | | | | | | | | | |
| 1796 | R.AAINKHIQTLRDW | | 642.104 | 4 | 2565.394 | 2565.394 | 0 | 0.3 | 5257 | 351.3 | 351.3 | 351.3 | 5.35 |
| | GVDVFTVPGK.G | | | | | | | | | | | | |
| 826 | K.HIQTLRDWGVDVF | | 890.987 | 4 | 3560.927 | 3560.926 | 0 | 0.3 | 5262 | 717.3 | 717.3 | 717.3 | 12.08 |
| | TVPGKGYSLPEPIPL | | | | | | | | | | | | |
| | LNAK.Q | | | | | | | | | | | | |
| 826 | K.HIQTLRDWGVDVF | | 1187.648 | 3 | 3560.929 | 3560.926 | 0 | 0.8 | 5262 | 677.9 | 677.9 | 677.9 | 9.70 |
| | TVPGKGYSLPEPIPL | | | | | | | | | | | | |
| | LNAK.Q | | | | | | | | | | | | |
| 826 | K.HIQTLRDWGVDVF | | 890.987 | 4 | 3560.927 | 3560.926 | 0 | 0.1 | 5262 | 662.3 | 662.3 | 662.3 | 11.08 |
| | TVPGKGYSLPEPIPL | | | | | | | | | | | | |
| | LNAK.Q | | | | | | | | | | | | |
| 826 | K.HIQTLRDWGVDVF | | 1187.982 | 3 | 3561.930 | 3560.926 | 1 | 0.1 | 5262 | 596.9 | 596.9 | 517.9 | 7.70 |
| | TVPGKGYSLPEPIPL | | | | | | | | | | | | |
| | LNAK.Q | | | | | | | | | | | | |
| 826 | K.HIQTLRDWGVDVF | | 712.991 | 5 | 3560.927 | 3560.926 | 0 | 0.1 | 5262 | 507.7 | 507.7 | 507.7 | 8.03 |
| | TVPGKGYSLPEPIPL | | | | | | | | | | | | |
| | LNAK.Q | | | | | | | | | | | | |
| 826 | K.HIQTLRDWGVDVF | | 594.328 | 6 | 3560.930 | 3560.926 | 0 | 0.9 | 5262 | 457.0 | 457.0 | 457.0 | 7.19 |
| | TVPGKGYSLPEPIPL | | | | | | | | | | | | |
| | LNAK.Q | | | | | | | | | | | | |
| 826 | K.HIQTLRDWGVDVF | | 712.991 | 5 | 3560.928 | 3560.926 | 0 | 0.4 | 5262 | 414.4 | 414.4 | 414.4 | 6.47 |
| | TVPGKGYSLPEPIPL | | | | | | | | | | | | |
| | LNAK.Q | | | | | | | | | | | | |
| 1810 | K.HIQTLRDWGVDVF | | 690.037 | 3 | 2068.098 | 2068.097 | 0 | 0.2 | 5262 | 413.4 | 413.4 | 413.4 | 7.40 |
| | TVPGK.G | | | | | | | | | | | | |
| 826 | K.HIQTLRDWGVDVF | | 712.991 | 5 | 3560.926 | 3560.926 | 0 | −0.1 | 5262 | 391.5 | 391.5 | 391.5 | 6.83 |
| | TVPGKGYSLPEPIPL | | | | | | | | | | | | |
| | LNAK.Q | | | | | | | | | | | | |
| 3102 | K.HIQTLRDWGVDVF | N[+1] | 713.188 | 5 | 3561.909 | 3561.910 | 0 | −0.3 | 5262 | 388.1 | 388.1 | 87.7 | 6.59 |
| | TVPGKGYSLPEPIPL | | | | | | | | | | | | |
| | LN[+0.984]AK.Q | | | | | | | | | | | | |
| 1810 | K.HIQTLRDWGVDVF | | 517.780 | 4 | 2068.098 | 2068.097 | 0 | 0.2 | 5262 | 357.1 | 357.1 | 357.1 | 5.66 |
| | TVPGK.G | | | | | | | | | | | | |
| 826 | K.HIQTLRDWGVDVF | | 712.991 | 5 | 3560.926 | 3560.926 | 0 | 0.0 | 5262 | 347.2 | 347.2 | 347.2 | 6.17 |
| | TVPGKGYSLPEPIPL | | | | | | | | | | | | |
| | LNAK.Q | | | | | | | | | | | | |
| 1109 | R.DWGVDVFTVPGKG | | 938.169 | 3 | 2812.492 | 2812.492 | 0 | 0.2 | 5268 | 925.3 | 925.3 | 925.3 | 30.00 |
| | YSLPEPIPLLNAK.Q | | | | | | | | | | | | |
| 1510 | R.DWGVDVFTVPGKG | N[+1] | 938.498 | 3 | 2813.480 | 2813.476 | 0 | 1.2 | 5268 | 731.1 | 731.1 | 460.2 | 12.39 |
| | YSLPEPIPLLN | | | | | | | | | | | | |
| | [+0.984] | | | | | | | | | | | | |
| | AK.Q | | | | | | | | | | | | |
| 1109 | R.DWGVDVFTVPGKG | | 1406.751 | 2 | 2812.495 | 2812.492 | 0 | 1.1 | 5268 | 728.5 | 728.5 | 728.5 | 12.39 |
| | YSLPEPIPLLNAK.Q | | | | | | | | | | | | |
| 1109 | R.DWGVDVFTVPGKG | | 703.879 | 4 | 2812.493 | 2812.492 | 0 | 0.3 | 5268 | 617.3 | 617.3 | 617.3 | 9.79 |
| | YSLPEPIPLLNAK.Q | | | | | | | | | | | | |
| 1109 | R.DWGVDVFTVPGKG | | 938.169 | 3 | 2812.492 | 2812.492 | 0 | 0.1 | 5268 | 541.1 | 541.1 | 541.1 | 7.82 |
| | YSLPEPIPLLNAK.Q | | | | | | | | | | | | |
| 931 | R.DWGVDVFTVPGK. | | 660.336 | 2 | 1319.664 | 1319.663 | 0 | 0.9 | 5268 | 532.0 | 532.0 | 532.0 | 7.78 |
| | G | | | | | | | | | | | | |
| 931 | R.DWGVDVFTVPGK. | | 660.335 | 2 | 1319.663 | 1319.663 | 0 | 0.2 | 5268 | 445.4 | 445.4 | 445.4 | 7.33 |
| | G | | | | | | | | | | | | |
| 931 | R.DWGVDVFTVPGK. | | 660.335 | 2 | 1319.663 | 1319.663 | 0 | 0.2 | 5268 | 357.2 | 357.2 | 357.2 | 5.48 |
| | G | | | | | | | | | | | | |
| 950 | K.GYSLPEPIPLLNA | | 756.427 | 2 | 1511.846 | 1511.847 | 0 | 0.3 | 5280 | 688.3 | 688.3 | 688.3 | 11.26 |
| | K.Q | | | | | | | | | | | | |
| 950 | K.GYSLPEPIPLLNA | | 504.621 | 3 | 1511.847 | 1511.847 | 0 | 0.1 | 5280 | 611.0 | 611.0 | 611.0 | 10.37 |
| | K.Q | | | | | | | | | | | | |
| 950 | K.GYSLPEPIPLLNA | | 756.427 | 2 | 1511.846 | 1511.847 | 0 | −0.3 | 5280 | 606.1 | 606.1 | 606.1 | 10.26 |
| | K.Q | | | | | | | | | | | | |
| 4644 | K.GYSLPEPIPLLN | N[+1] | 756.919 | 2 | 1512.831 | 1512.831 | 0 | 0.3 | 5280 | 554.7 | 521.6 | 521.6 | 9.12 |
| | [+0.984]AK.Q | | | | | | | | | | | | |
| 950 | K.GYSLPEPIPLLNA | | 756.427 | 2 | 1511.846 | 1511.847 | 0 | 0.5 | 5280 | 544.2 | 544.2 | 544.2 | 8.42 |
| | K.Q | | | | | | | | | | | | |
| 950 | K.GYSLPEPIPLLNA | | 756.427 | 2 | 1511.847 | 1511.847 | 0 | 0.1 | 5280 | 529.1 | 529.1 | 529.1 | 9.12 |
| | K.Q | | | | | | | | | | | | |
| 950 | K.GYSLPEPIPLLNA | | 756.427 | 2 | 1511.847 | 1511.847 | 0 | 0.4 | 5280 | 513.3 | 513.3 | 513.3 | 8.91 |
| | K.Q | | | | | | | | | | | | |
| 950 | K.GYSLPEPIPLLNA | | 756.427 | 2 | 1511.847 | 1511.847 | 0 | 0.2 | 5280 | 430.4 | 430.4 | 430.4 | 8.56 |
| | K.Q | | | | | | | | | | | | |
| 950 | K.GYSLPEPIPLLNA | | 756.427 | 2 | 1511.846 | 1511.847 | 0 | 0.3 | 5280 | 377.6 | 377.6 | 377.6 | 7.01 |
| | K.Q | | | | | | | | | | | | |
| 4645 | K.GYSLPEPIPLLNA | | 1091.591 | 4 | 4363.341 | 4363.355 | 0 | 3.1 | 5280 | 369.5 | 369.5 | 369.5 | 4.56 |
| | KQILGQLDGGSVAVL | | | | | | | | | | | | |
| | PVVDSTNQYLLDR.I | | | | | | | | | | | | |
| 950 | K.GYSLPEPIPLLNA | | 756.427 | | 1511.846 | 1511.847 | 0 | 0.3 | 5280 | 309.0 | 309.0 | 309.0 | 5.29 |
| | K.Q | | | | | | | | | | | | |
| 3127 | K.QILGQLDGGSVAV | N[+1] | 1137.953 | 3 | 3411.843 | 3411.837 | 0 | 1.9 | 5294 | ##### | #### | 456.3 | 30.00 |
| | LPVVDSTN | | | | | | | | | | | | |
| | [+0.984] | | | | | | | | | | | | |
| | QYLLDRIGELK.S | | | | | | | | | | | | |
| 964 | K.QILGQLDGGSVAV | | 1137.623 | 3 | 3410.855 | 3410.853 | 0 | 0.5 | 5294 | 962.3 | 962.3 | 962.3 | 30.00 |
| | LPVVDSTNQYLLDRI | | | | | | | | | | | | |
| | GELK.S | | | | | | | | | | | | |
| 964 | K.QILGQLDGGSVAV | | 1137.624 | 3 | 3410.856 | 3410.853 | 0 | 0.9 | 5294 | 944.1 | 944.1 | 944.1 | 30.00 |
| | LPVVDSTNQYLLDRI | | | | | | | | | | | | |
| | GELK.S | | | | | | | | | | | | |
| 964 | K.QILGQLDGGSVAV | | 1137.953 | 3 | 3411.844 | 3410.853 | 1 | −3.7 | 5294 | 893.1 | 893.1 | 247.5 | 14.07 |
| | LPVVDSTNQYLLDRI | | | | | | | | | | | | |
| | GELK.S | | | | | | | | | | | | |
| 893 | K.QILGQLDGGSVAV | | 1435.766 | 2 | 2870.525 | 2870.526 | 0 | 0.2 | 5294 | 863.1 | 863.1 | 863.1 | 15.65 |
| | LPVVDSTNQYLLDR. | | | | | | | | | | | | |
| | I | | | | | | | | | | | | |
| 964 | K.QILGQLDGGSVAV | | 853.469 | 4 | 3410.853 | 340.853 | 0 | 0.1 | 5294 | 835.9 | 835.9 | 835.9 | 13.79 |
| | LPVVDSTNQYLLDRI | | | | | | | | | | | | |
| | GELK.S | | | | | | | | | | | | |
| 964 | K.QILGQLDGGSVAV | | 853.469 | 4 | 3410.854 | 340.853 | 0 | 0.2 | 5294 | 832.8 | 832.8 | 832.8 | 13.79 |
| | LPVVDSTNQYLLDRI | | | | | | | | | | | | |
| | GELK.S | | | | | | | | | | | | |
| 964 | K.QILGQLDGGSVAV | | 1137.623 | 3 | 3410.853 | 340.853 | 0 | 0.0 | 5294 | 829.1 | 829.1 | 829.1 | 14.39 |
| | LPVVDSTNQYLLDRI | | | | | | | | | | | | |
| | GELK.S | | | | | | | | | | | | |
| 964 | K.QILGQLDGGSVAV | | 853.469 | 4 | 3410.854 | 340.853 | 0 | 0.2 | 5294 | 825.1 | 825.1 | 825.1 | 13.79 |
| | LPVVDSTNQYLLDRI | | | | | | | | | | | | |
| | GELK.S | | | | | | | | | | | | |
| 3127 | K.QILGQLDGGSVAV | | 1137.956 | 3 | 3411.854 | 3411.837 | 0 | 5.1 | 5294 | 737.1 | 737.1 | 162.1 | 11.15 |
| | LPVVDSTN | | | | | | | | | | | | |
| | [+0.984] | | | | | | | | | | | | |
| | QYLLDRIGELK.SN | | | | | | | | | | | | |
| | [+1] | | | | | | | | | | | | |
| 893 | K.QILGQLDGGSVAV | | 957.513 | 3 | 2870.525 | 2870.526 | 0 | 0.3 | 5294 | 729.2 | 729.2 | 729.2 | 11.27 |
| | LPVVDSTNQYLLDR. | | | | | | | | | | | | |
| | I | | | | | | | | | | | | |
| 893 | K.QILGQLDGGSVAV | | 1435.767 | 2 | 2870.526 | 2870.526 | 0 | 0.0 | 5294 | 712.8 | 712.8 | 712.8 | 12.58 |
| | LPVVDSTNQYLLDR. | | | | | | | | | | | | |
| | I | | | | | | | | | | | | |
| 893 | K.QILGQLDGGSVAV | | 1435.768 | 2 | 2870.528 | 2870.526 | 0 | 0.8 | 5294 | 709.5 | 709.5 | 709.5 | 12.58 |
| | LPVVDSTNQYLLDR. | | | | | | | | | | | | |
| | I | | | | | | | | | | | | |
| 964 | K.QILGQLDGGSVAV | | 1137.625 | 3 | 3410.860 | 340.853 | 0 | 2.1 | 5294 | 687.8 | 687.8 | 687.8 | 11.39 |
| | LPVVDSTNQYLLDRI | | | | | | | | | | | | |
| | GELK.S | | | | | | | | | | | | |
| 964 | K.QILGQLDGGSVAV | | 1137.620 | 3 | 3410.845 | 340.853 | 0 | −2.4 | 5294 | 681.7 | 681.7 | 681.7 | 10.68 |
| | LPVVDSTNQYLLDRI | | | | | | | | | | | | |
| | GELK.S | | | | | | | | | | | | |
| 964 | K.QILGQLDGGSVAV | | 853.469 | 4 | 3410.853 | 340.853 | 0 | −0.1 | 5294 | 680.7 | 680.7 | 680.7 | 10.79 |
| | LPVVDSTNQYLLDRI | | | | | | | | | | | | |
| | GELK.S | | | | | | | | | | | | |
| 893 | K.QILGQLDGGSVAV | | 957.514 | 3 | 2870.527 | 2870.526 | 0 | 0.3 | 5294 | 677.3 | 677.3 | 677.3 | 10.98 |
| | LPVVDSTNQYLLDR. | | | | | | | | | | | | |
| | I | | | | | | | | | | | | |
| 964 | K.QILGQLDGGSVAV | | 853.469 | 4 | 3410.853 | 340.853 | 0 | 0.1 | 5294 | 674.3 | 674.3 | 674.3 | 10.79 |
| | LPVVDSTNQYLLDRI | | | | | | | | | | | | |
| | GELK.S | | | | | | | | | | | | |
| 3127 | K.QILGQLDGGSVAV | | 853.715 | 4 | 3411.840 | 3411.837 | 0 | 0.8 | 5294 | 628.0 | 628.0 | 220.5 | 9.79 |
| | LPVVDSTN | | | | | | | | | | | | |
| | [+0.984] | | | | | | | | | | | | |
| | QYLLDRIGELK.SN | | | | | | | | | | | | |
| | [+1] | | | | | | | | | | | | |
| 893 | K.QILGQLDGGSVAV | | 718.387 | 4 | 2870.527 | 2870.526 | 0 | 0.5 | 5294 | 626.7 | 626.7 | 626.7 | 9.98 |
| | LPVVDSTNQYLLDR. | | | | | | | | | | | | |
| | I | | | | | | | | | | | | |
| 893 | K.QILGQLDGGSVAV | | 957.513 | 3 | 2870.523 | 2870.526 | 0 | −0.8 | 5294 | 619.4 | 619.4 | 619.4 | 9.27 |
| | LPVVDSTNQYLLDR. | | | | | | | | | | | | |
| | I | | | | | | | | | | | | |
| 893 | K.QILGQLDGGSVAV | | 957.513 | 3 | 2870.525 | 2870.526 | 0 | 0.2 | 5294 | 591.8 | 591.8 | 591.8 | 8.98 |
| | LPVVDSTNQYLLDR. | | | | | | | | | | | | |
| | I | | | | | | | | | | | | |
| 964 | K.QILGQLDGGSVAV | | 1137.626 | 3 | 3410.864 | 340.853 | 0 | 3.1 | 5294 | 589.2 | 589.2 | 589.2 | 6.94 |
| | LPVVDSTNQYLLDRI | | | | | | | | | | | | |
| | GELK.S | | | | | | | | | | | | |
| 893 | K.QILGQLDGGSVAV | | 957.513 | 3 | 2870.525 | 2870.526 | 0 | 0.2 | 5294 | 580.7 | 580.7 | 580.7 | 8.98 |
| | LPVVDSTNQYLLDR. | | | | | | | | | | | | |
| | I | | | | | | | | | | | | |
| 893 | K.QILGQLDGGSVAV | | 718.388 | 4 | 2870.528 | 2870.526 | 0 | 0.8 | 5294 | 578.3 | 578.3 | 578.3 | 8.98 |
| | LPVVDSTNQYLLDR. | | | | | | | | | | | | |
| | I | | | | | | | | | | | | |
| 1505 | K.QILGQLDGGSVAV | | 957.842 | 3 | 2871.511 | 2871.5 | 0 | 0.4 | 5294 | 571.3 | 571.3 | 61.9 | 8.98 |
| | LPVVDSTN | | | | | | | | | | | | |
| | [+0.984]QYLLD | | | | | | | | | | | | |
| | R.IN[+1] | | | | | | | | | | | | |
| 893 | K.QILGQLDGGSVAV | | 957.514 | 3 | 2870.527 | 2870.526 | 0 | 0.3 | 5294 | 563.7 | 563.7 | 563.7 | 8.98 |
| | LPVVDSTNQYLLDR. | | | | | | | | | | | | |
| | I | | | | | | | | | | | | |
| 893 | K.QILGQLDGGSVAV | | 957.514 | 3 | 2870.528 | 2870.526 | 0 | 0.6 | 5294 | 547.2 | 547.2 | 547.2 | 7.17 |
| | LPVVDSTNQYLLDR. | | | | | | | | | | | | |
| | I | | | | | | | | | | | | |
| 893 | K.QILGQLDGGSVAV | | 957.514 | 3 | 2870.527 | 2870.526 | 0 | 0.3 | 5294 | 545.0 | 545.0 | 545.0 | 8.14 |
| | LPVVDSTNQYLLDR. | | | | | | | | | | | | |
| | I | | | | | | | | | | | | |
| 893 | K.QILGQLDGGSVAV | | 957.514 | 3 | 2870.528 | 2870.526 | 0 | 0.8 | 5294 | 538.9 | 538.9 | 538.9 | 17.17 |
| | LPVVDSTNQYLLDR. | | | | | | | | | | | | |
| | I | | | | | | | | | | | | |
| 893 | K.QILGQLDGGSVAV | | 718.387 | 4 | 2870.528 | 2870.526 | 0 | 0.7 | 5294 | 530.9 | 530.9 | 530.9 | 7.41 |
| | LPVVDSTNQYLLDR. | | | | | | | | | | | | |
| | I | | | | | | | | | | | | |
| 1505 | K.QILGQLDGGSVAV | | 958.516 | 3 | 2873.535 | 2871.5 | 2 | 6.3 | 5294 | 523.0 | 523.0 | 523.0 | 6.06 |
| | LPVVDSTN | | | | | | | | | | | | |
| | [+0.984]QYLL | | | | | | | | | | | | |
| | DR.IN[+1] | | | | | | | | | | | | |
| 893 | K.QILGQLDGGSVAV | | 718.387 | 4 | 2870.528 | 2870.526 | 0 | 0.7 | 5294 | 475.2 | 475.2 | 475.2 | 6.72 |
| | LPVVDSTNQYLLDR. | | | | | | | | | | | | |
| | I | | | | | | | | | | | | |
| 964 | K.QILGQLDGGSVAV | | 1137.624 | 3 | 3410.856 | 340.853 | 0 | 0.9 | 5294 | 472.3 | 472.3 | 472.3 | 6.89 |
| | LPVVDSTNQYLLDRI | | | | | | | | | | | | |
| | GELK.S | | | | | | | | | | | | |
| 964 | K.QILGQLDGGSVAV | | 1137.611 | 3 | 3410.819 | 340.853 | 0 | −9.9 | 5294 | 456.2 | 456.2 | 456.2 | 5.20 |
| | LPVVDSTNQYLLDRI | | | | | | | | | | | | |
| | GELK.S | | | | | | | | | | | | |
| 893 | K.QILGQLDGGSVAV | | 957.514 | 3 | 2870.528 | 2870.526 | 0 | 0.8 | 5294 | 433.3 | 433.3 | 433.3 | 6.22 |
| | LPVVDSTNQYLLDR. | | | | | | | | | | | | |
| | I | | | | | | | | | | | | |
| 893 | K.QILGQLDGGSVAV | | 957.513 | 3 | 2870.525 | 2870.526 | 0 | −0.4 | 5294 | 386.6 | 386.6 | 386.6 | 5.79 |
| | LPVVDSTNQYLLDR. | | | | | | | | | | | | |
| | I | | | | | | | | | | | | |
| 893 | K.QILGQLDGGSVAV | | 957.516 | 3 | 2870.532 | 2870.526 | 0 | 2.2 | 5294 | 385.4 | 385.4 | 385.4 | 6.49 |
| | LPVVDSTNQYLLDR. | | | | | | | | | | | | |
| | I | | | | | | | | | | | | |
| 893 | K.QILGQLDGGSVAV | | 957.513 | 3 | 2870.525 | 2870.526 | 0 | −0.2 | 5294 | 338.9 | 338.9 | 338.9 | 5.35 |
| | LPVVDSTNQYLLDR. | | | | | | | | | | | | |
| | I | | | | | | | | | | | | |
| 1692 | R.IGELKSGDAC | | 1033.503 | 2 | 2065.998 | 2065.997 | 0 | 0.4 | 5321 | 600.8 | 600.8 | 600.8 | 10.77 |
| | [+57.021]IA | | | | | | | | | | | | |
| | EYQQAGR | | | | | | | | | | | | |
| | .GC[+57] | | | | | | | | | | | | |
| 1692 | R.IGELKSGDAC | | 689.337 | 3 | 2065.997 | 2065.997 | 0 | 0.1 | 5321 | 532.8 | 532.8 | 532.8 | 18.93 |
| | [+57.021]IA | | | | | | | | | | | | |
| | EYQQAGR | | | | | | | | | | | | |
| | .GC[+57] | | | | | | | | | | | | |
| 1692 | R.IGELKSGDAC | | 689.337 | 3 | 2065.997 | 2065.997 | 0 | 0.1 | 5321 | 314.4 | 314.4 | 314.4 | 5.58 |
| | [+57.021]IA | | | | | | | | | | | | |
| | EYQQAGR | | | | | | | | | | | | |
| | .GC[+57] | | | | | | | | | | | | |
| 1698 | K.SGDAC | | 763.338 | 2 | 1525.669 | 1525.670 | 0 | 0.6 | 5326 | 851.0 | 851.0 | 851.0 | 15.26 |
| | [+57.021] | | | | | | | | | | | | |
| | IAEYQQAGR.G | | | | | | | | | | | | |
| | C[+57] | | | | | | | | | | | | |
| 1711 | K.SGDAC | | 609.280 | 3 | 1825.826 | 1825.825 | 0 | 0.5 | 5326 | 661.9 | 661.9 | 661.9 | 11.77 |
| | [+57.021] | | | | | | | | | | | | |
| | IAEYQQAGRGSR.G | | | | | | | | | | | | |
| | C[+57] | | | | | | | | | | | | |
| 1711 | K.SGDAC | | 913.416 | 2 | 1825.825 | 1825.825 | 0 | 0.4 | 5326 | 411.6 | 411.6 | 411.6 | 7.40 |
| | [+57.021]I | | | | | | | | | | | | |
| | AEYQQAGRGSR.G | | | | | | | | | | | | |
| | C[+57] | | | | | | | | | | | | |
| 822 | K.RGPAAIGLGPVIG | | 687.738 | 3 | 2061.200 | 2061.200 | 0 | 0.1 | 5364 | 548.2 | 548.2 | 548.2 | 19.12 |
| | IVMAEALR.K | | | | | | | | | | | | |
| 822 | K.RGPAAIGLGPVIG | | 687.738 | 3 | 2061.201 | 2061.200 | 0 | 0.2 | 5364 | 493.4 | 493.4 | 493.4 | 8.91 |
| | IVMAEALR.K | | | | | | | | | | | | |
| 822 | K.RGPAAIGLGPVIG | | 687.739 | 3 | 2061.203 | 2061.200 | 0 | 1.2 | 5364 | 460.7 | 460.7 | 460.7 | 8.67 |
| | IVMAEALR.K | | | | | | | | | | | | |
| 822 | K.RGPAAIGLGPVIG | | 687.739 | 3 | 2061.202 | 2061.200 | 0 | 0.7 | 5364 | 442.4 | 442.4 | 442.4 | 7.94 |
| | IVMAEALR.K | | | | | | | | | | | | |
| 919 | R.VKWPNDLYLQDRK | | 558.970 | 3 | 1674.895 | 1674.896 | 0 | −0.6 | 5393 | 570.2 | 570.2 | 570.2 | 8.38 |
| | .L | | | | | | | | | | | | |
| 912 | R.VKWPNDLYLQDR. | | 516.272 | 3 | 1546.801 | 1546.801 | 0 | 0.2 | 5393 | 559.9 | 467.1 | 467.1 | 7.83 |
| | K | | | | | | | | | | | | |
| 912 | R.VKWPNDLYLQDR. | | 516.272 | 3 | 1546.801 | 1546.801 | 0 | 0.0 | 5393 | 546.6 | 541.2 | 541.2 | 7.83 |
| | K | | | | | | | | | | | | |
| 919 | R.VKWPNDLYLQDRK | | 419.480 | 4 | 1674.896 | 1674.896 | 0 | 0.0 | 5393 | 537.2 | 537.2 | 537.2 | 8.25 |
| | .L | | | | | | | | | | | | |
| 912 | R.VKWPNDLYLQDR. | | 773.905 | 2 | 1546.802 | 1546.801 | 0 | 0.3 | 5393 | 514.6 | 442.0 | 442.0 | 7.62 |
| | K | | | | | | | | | | | | |
| 919 | R.VKWPNDLYLQDRK | | 558.970 | 3 | 1674.896 | 1674.896 | 0 | 0.3 | 5393 | 496.3 | 496.3 | 496.3 | 7.07 |
| | .L | | | | | | | | | | | | |
| 919 | R.VKWPNDLYLQDRK | | 558.970 | 3 | 1674.896 | 1674.896 | 0 | −0.4 | 5393 | 468.7 | 468.7 | 468.7 | 6.12 |
| | .L | | | | | | | | | | | | |
| 912 | R.VKWPNDLYLQDR. | | 516.272 | 3 | 1546.801 | 1546.801 | 0 | 0.0 | 5393 | 468.3 | 468.3 | 468.3 | 7.13 |
| | K | | | | | | | | | | | | |
| 919 | R.VKWPNDLYLQDRK | | 558.970 | 3 | 1674.895 | 1674.896 | 0 | 0.6 | 5393 | 411.7 | 396.4 | 396.4 | 6.01 |
| | .L | | | | | | | | | | | | |
| 4646 | R.VKWPN[+0.984] | N[+1] | 516.935 | 3 | 1548.789 | 1547.785 | 1 | 0.5 | 5393 | 305.1 | 305.1 | 305.1 | 3.33 |
| | DLYLQDR.K | | | | | | | | | | | | |
| 4647 | R.KLAGILVELAGIT | M[+16] | 738.425 | 4 | 2950.679 | 2950.676 | 0 | 1.0 | 5405 | 509.0 | 509.0 | 509.0 | 6.96 |
| | GDAAQIVIGAGINVA | | | | | | | | | | | | |
| | M[+15.995]R.R | | | | | | | | | | | | |
| 4648 | R.KLAGILVELAGIT | | 734.427 | 4 | 2934.685 | 2934.681 | 0 | 1.3 | 5405 | 430.4 | 430.4 | 430.4 | 6.61 |
| | GDAAQIVIGAGINVA | | | | | | | | | | | | |
| | MR.R | | | | | | | | | | | | |
| 4649 | K.LAGILVELAGITG | M[+16] | 941.534 | 3 | 2822.588 | 2822.581 | 0 | 2.6 | 5406 | 603.7 | 603.7 | 603.7 | 7.77 |
| | DAAQIVIGAGINVAM | | | | | | | | | | | | |
| | [+15.995]R.R | | | | | | | | | | | | |
| 1075 | K.LAGILVELAGITG | | 936.200 | 3 | 2806.586 | 2806.586 | 0 | 0.1 | 5406 | 596.1 | 596.1 | 596.1 | 8.98 |
| | DAAQIVIGAGINVAM | | | | | | | | | | | | |
| | R.R | | | | | | | | | | | | |
| 1075 | K.LAGILVELAGITG | | 702.403 | 4 | 2806.588 | 2806.586 | 0 | 0.8 | 5406 | 533.3 | 533.3 | 533.3 | 8.14 |
| | DAAQIVIGAGINVAM | | | | | | | | | | | | |
| | R.R | | | | | | | | | | | | |
| 857 | R.RVEESVVNQGWIT | | 895.737 | 4 | 3579.926 | 3579.924 | 0 | 0.5 | 5435 | 936.9 | 936.9 | 936.9 | 30.00 |
| | LQEAGINLDRNTLAA | | | | | | | | | | | | |
| | TLIR.E | | | | | | | | | | | | |
| 857 | R.RVEESVVNQGWIT | | 716.991 | 5 | 3580.925 | 3579.924 | 1 | 0.6 | 5435 | 873.5 | 755.4 | 132.5 | 14.09 |
| | LQEAGINLDRNTLAA | | | | | | | | | | | | |
| | TLIR.E | | | | | | | | | | | | |
| 857 | R.RVEESVVNQGWIT | | 895.737 | 4 | 3579.926 | 3579.924 | 0 | 0.4 | 5435 | 693.1 | 601.8 | 601.8 | 11.39 |
| | LQEAGINLDRNTLAA | | | | | | | | | | | | |
| | TLIR.E | | | | | | | | | | | | |
| 857 | R.RVEESVVNQGWIT | | 895.736 | 4 | 3579.923 | 3579.924 | 0 | 0.3 | 5435 | 683.4 | 604.3 | 604.3 | 10.68 |
| | LQEAGINLDRNTLAA | | | | | | | | | | | | |
| | TLIR.E | | | | | | | | | | | | |
| 857 | R.RVEESVVNQGWIT | | 895.737 | 4 | 3579.926 | 3579.924 | 0 | 0.5 | 5435 | 660.0 | 576.4 | 576.4 | 11.39 |
| | LQEAGINLDRNTLAA | | | | | | | | | | | | |
| | TLIR.E | | | | | | | | | | | | |
| 857 | R.RVEESVVNQGWIT | | 895.737 | 4 | 3579.926 | 3579.924 | 0 | 0.5 | 5435 | 641.4 | 637.4 | 637.4 | 10.39 |
| | LQEAGINLDRNTLAA | | | | | | | | | | | | |
| | TLIR.E | | | | | | | | | | | | |
| 1067 | R.RVEESVVNQGWIT | | 876.124 | 3 | 2626.356 | 2626.358 | 0 | −0.8 | 5435 | 523.4 | 523.4 | 523.4 | 17.45 |
| | LQEAGINLDR.N | | | | | | | | | | | | |
| 1292 | R.VEESVVNQGWITL | | 856.711 | 4 | 3423.821 | 3423.823 | 0 | 0.5 | 5436 | 839.4 | 839.4 | 839.4 | 13.08 |
| | QEAGINLDRNTLAAT | | | | | | | | | | | | |
| | LIR.E | | | | | | | | | | | | |
| 1292 | R.VEESVVNQGWITL | | 1141.946 | 3 | 3423.824 | 3423.823 | 0 | 0.4 | 5436 | 801.4 | 801.4 | 801.4 | 14.39 |
| | QEAGINLDRNTLAAT | | | | | | | | | | | | |
| | LIR.E | | | | | | | | | | | | |
| 1292 | R.VEESVVNQGWITL | | 856.711 | 4 | 3423.824 | 3423.823 | 0 | 0.3 | 5436 | 795.7 | 795.7 | 795.7 | 12.79 |
| | QEAGINLDRNTLAAT | | | | | | | | | | | | |
| | LIR.E | | | | | | | | | | | | |
| 1292 | R.VEESVVNQGWITL | | 1141.948 | 3 | 3423.828 | 3423.823 | 0 | 1.5 | 5436 | 786.8 | 786.8 | 786.8 | 13.39 |
| | QEAGINLDRNTLAAT | | | | | | | | | | | | |
| | LIR.E | | | | | | | | | | | | |
| 1292 | R.VEESVVNQGWITL | | 685.571 | 5 | 3423.824 | 3423.823 | 0 | 0.2 | 5436 | 673.0 | 673.0 | 673.0 | 10.79 |
| | QEAGINLDRNTLAAT | | | | | | | | | | | | |
| | LIR.E | | | | | | | | | | | | |
| 2188 | R.NTLAATLIR.E | | 486.795 | 2 | 972.583 | 972.584 | 0 | −0.3 | 5458 | 439.6 | 1310.8 | 310.8 | 5.08 |
| 1032 | R.AALELFEQEGLAP | | 787.415 | 3 | 2360.229 | 2360.229 | 0 | 0.4 | 5470 | 684.0 | 684.0 | 684.0 | 11.77 |
| | YLPRWEK.L | | | | | | | | | | | | |
| 1032 | R.AALELFEQEGLAP | | 787.415 | 3 | 2360.230 | 2360.229 | 0 | 0.7 | 5470 | 502.5 | 502.5 | 502.5 | 7.99 |
| | YLPRWEK.L | | | | | | | | | | | | |
| 1914 | R.AALELFEQEGLAP | | 959.011 | 2 | 1917.015 | 1917.012 | 0 | 1.9 | 5470 | 442.1 | 442.1 | 442.1 | 7.94 |
| | YLPR.W | | | | | | | | | | | | |
| 1914 | R.AALELFEQEGLAP | | 639.677 | 3 | 1917.015 | 1917.012 | 0 | 1.7 | 5470 | 375.6 | 375.6 | 375.6 | 7.12 |
| | YLPR.W | | | | | | | | | | | | |
| 1032 | R.AALELFEQEGLAP | | 787.415 | 3 | 2360.231 | 2360.229 | 0 | 0.8 | 5470 | 339.0 | 339.0 | 339.0 | 5.51 |
| | YLPRWEK.L | | | | | | | | | | | | |
| 1914 | R.AALELFEQEGLAP | | 639.675 | 3 | 1917.009 | 1917.012 | 0 | −1.4 | 5470 | 306.0 | 306.0 | 306.0 | 4.47 |
| | YLPR.W | | | | | | | | | | | | |
| 973 | R.WEKLDNFINRPVK | | 553.639 | 3 | 1658.901 | 1658.901 | 0 | 0.1 | 5487 | 520.5 | 520.5 | 520.5 | 7.83 |
| | .L | | | | | | | | | | | | |
| 973 | R.WEKLDNFINRPVK | | 415.481 | 4 | 1658.902 | 1658.901 | 0 | 0.2 | 5487 | 450.3 | 450.3 | 450.3 | 7.38 |
| | .L | | | | | | | | | | | | |
| 973 | R.WEKLDNFINRPVK | | 553.639 | 3 | 1658.901 | 1658.901 | 0 | 0.2 | 5487 | 448.7 | 448.7 | 448.7 | 7.13 |
| | .L | | | | | | | | | | | | |
| 820 | K.LDNFINRPVKLII | | 532.308 | 5 | 2657.513 | 2657.514 | 0 | 0.4 | 5490 | 466.4 | 466.4 | 466.4 | 6.73 |
| | GDKEIFGISR.G | | | | | | | | | | | | |
| 1931 | K.LDNFINRPVK.L | | 405.900 | 3 | 1215.684 | 1215.684 | 0 | 0.0 | 5490 | 433.2 | 433.2 | 433.2 | 6.99 |
| 820 | K.LDNFINRPVKLII | | 532.309 | 5 | 2657.514 | 2657.514 | 0 | −0.1 | 5490 | 300.6 | 300.6 | 300.6 | 5.27 |
| | GDKEIFGISR.G | | | | | | | | | | | | |
| 983 | K.LIIGDKEIFGISR | | 730.927 | 2 | 1460.847 | 1460.847 | 0 | 0.1 | 5500 | 667.7 | 667.7 | 667.7 | 11.40 |
| | .G | | | | | | | | | | | | |
| 983 | K.LIIGDKEIFGISR | | 487.620 | 3 | 1460.847 | 1460.847 | 0 | 0.3 | 5500 | 657.7 | 657.7 | 657.7 | 10.69 |
| | .G | | | | | | | | | | | | |
| 983 | K.LIIGDKEIFGISR | | 487.621 | 3 | 1460.847 | 1460.847 | 0 | 0.0 | 5500 | 604.9 | 604.9 | 604.9 | 10.40 |
| | .G | | | | | | | | | | | | |
| 983 | K.LIIGDKEIFGISR | | 487.621 | 3 | 1460.848 | 1460.847 | 0 | 0.3 | 5500 | 548.8 | 548.8 | 548.8 | 18.56 |
| | .G | | | | | | | | | | | | |
| 983 | K.LIIGDKEIFGISR | | 487.620 | 3 | 1460.846 | 1460.847 | 0 | 0.5 | 5500 | 542.7 | 542.7 | 542.7 | 7.13 |
| | .G | | | | | | | | | | | | |
| 983 | K.LIIGDKEIFGISR | | 487.621 | 3 | 1460.847 | 1460.847 | 0 | −0.2 | 5500 | 436.4 | 436.4 | 436.4 | 7.27 |
| | .G | | | | | | | | | | | | |
| 837 | R.GIDKQGALLLEQD | | 975.196 | 3 | 2923.573 | 2923.571 | 0 | 0.7 | 5513 | 875.9 | 875.9 | 875.9 | 15.35 |
| | GVIKPWMGGEISLR. | | | | | | | | | | | | |
| | S | | | | | | | | | | | | |
| 837 | R.GIDKQGALLLEQD | | 975.195 | 3 | 2923.571 | 2923.571 | 0 | 0.1 | 5513 | 826.4 | 826.4 | 826.4 | 14.39 |
| | GVIKPWMGGEISLR. | | | | | | | | | | | | |
| | S | | | | | | | | | | | | |
| 837 | R.GIDKQGALLLEQD | | 975.195 | 3 | 2923.572 | 2923.571 | 0 | 0.2 | 5513 | 802.2 | 802.2 | 802.2 | 14.39 |
| | GVIKPWMGGEISLR. | | | | | | | | | | | | |
| | S | | | | | | | | | | | | |
| 837 | R.GIDKQGALLLEQD | | 731.648 | 4 | 2923.572 | 2923.571 | 0 | 0.2 | 5513 | 775.1 | 775.1 | 775.1 | 13.39 |
| | GVIKPWMGGEISLR. | | | | | | | | | | | | |
| | S | | | | | | | | | | | | |
| 837 | R.GIDKQGALLLEQD | | 731.648 | 4 | 2923.572 | 2923.571 | 0 | 0.3 | 5513 | 759.6 | 759.6 | 759.6 | 13.39 |
| | GVIKPWMGGEISLR. | | | | | | | | | | | | |
| | S | | | | | | | | | | | | |
| 837 | R.GIDKQGALLLEQD | | 731.649 | 4 | 2923.573 | 2923.571 | 0 | 0.7 | 5513 | 758.9 | 758.9 | 758.9 | 13.39 |
| | GVIKPWMGGEISLR. | | | | | | | | | | | | |
| | S | | | | | | | | | | | | |
| 837 | R.GIDKQGALLLEQD | | 1462.790 | 2 | 2924.573 | 2923.571 | 1 | 0.3 | 5513 | 752.5 | 752.5 | 752.5 | 11.30 |
| | GVIKPWMGGEISLR. | | | | | | | | | | | | |
| | S | | | | | | | | | | | | |
| 837 | R.GIDKQGALLLEQD | | 975.195 | 3 | 2923.570 | 2923.571 | 0 | 0.5 | 5513 | 744.6 | 744.6 | 744.6 | 11.68 |
| | GVIKPWMGGEISLR. | | | | | | | | | | | | |
| | S | | | | | | | | | | | | |
| 837 | R.GIDKQGALLLEQD | | 731.648 | 4 | 2923.572 | 2923.571 | 0 | 0.2 | 5513 | 720.6 | 720.6 | 720.6 | 12.39 |
| | GVIKPWMGGEISLR. | | | | | | | | | | | | |
| | S | | | | | | | | | | | | |
| 837 | R.GIDKQGALLLEQD | | 975.864 | 3 | 2925.576 | 2923.571 | 2 | −0.6 | 5513 | 714.1 | 714.1 | 714.1 | 11.68 |
| | GVIKPWMGGEISLR. | | | | | | | | | | | | |
| | S | | | | | | | | | | | | |
| 837 | R.GIDKQGALLLEQD | | 731.648 | 4 | 2923.569 | 2923.571 | 0 | 0.7 | 5513 | 706.1 | 706.1 | 706.1 | 11.68 |
| | GVIKPWMGGEISLR. | | | | | | | | | | | | |
| | S | | | | | | | | | | | | |
| 1612 | R.GIDKQGALLLEQD | M[+16] | 980.527 | 3 | 2939.566 | 2939.566 | 0 | 0.1 | 5513 | 703.6 | 703.6 | 703.6 | 12.39 |
| | GVIKPWM | | | | | | | | | | | | |
| | [+15.995]GGE | | | | | | | | | | | | |
| | ISLR.S | | | | | | | | | | | | |
| 837 | R.GIDKQGALLLEQD | | 731.648 | 4 | 2923.570 | 2923.571 | 0 | −0.4 | 5513 | 698.4 | 698.4 | 698.4 | 10.68 |
| | GVIKPWMGGEISLR. | | | | | | | | | | | | |
| | S | | | | | | | | | | | | |
| 837 | R.GIDKQGALLLEQD | | 731.648 | 4 | 2923.572 | 2923.571 | 0 | 0.2 | 5513 | 697.4 | 697.4 | 697.4 | 11.39 |
| | GVIKPWMGGEISLR. | | | | | | | | | | | | |
| | S | | | | | | | | | | | | |
| 1612 | R.GIDKQGALLLEQD | M[+16] | 735.647 | 4 | 2939.567 | 2939.566 | 0 | 0.4 | 5513 | 694.0 | 694.0 | 694.0 | 11.39 |
| | GVIKPWM | | | | | | | | | | | | |
| | [+15.995]GG | | | | | | | | | | | | |
| | EISLR.S | | | | | | | | | | | | |
| 837 | R.GIDKQGALLLEQD | | 975.196 | 3 | 2923.572 | 2923.571 | 0 | 0.3 | 5513 | 693.5 | 693.5 | 693.5 | 11.39 |
| | GVIKPWMGGEISLR. | | | | | | | | | | | | |
| | S | | | | | | | | | | | | |
| 837 | R.GIDKQGALLLEQD | | 731.648 | 4 | 2923.571 | 2923.571 | 0 | 0.1 | 5513 | 685.2 | 685.2 | 685.2 | 11.39 |
| | GVIKPWMGGEISLR. | | | | | | | | | | | | |
| | S | | | | | | | | | | | | |
| 837 | R.GIDKQGALLLEQD | | 731.648 | 4 | 2923.572 | 2923.571 | 0 | 0.3 | 5513 | 679.9 | 679.9 | 679.9 | 11.39 |
| | GVIKPWMGGEISLR. | | | | | | | | | | | | |
| | S | | | | | | | | | | | | |
| 837 | R.GIDKQGALLLEQD | | 731.649 | 4 | 2923.573 | 2923.571 | 0 | 0.5 | 5513 | 661.7 | 661.7 | 661.7 | 11.39 |
| | GVIKPWMGGEISLR. | | | | | | | | | | | | |
| | S | | | | | | | | | | | | |
| 837 | R.GIDKQGALLLEQD | | 731.649 | 4 | 2923.573 | 2923.571 | 0 | 0.5 | 5513 | 638.5 | 638.5 | 638.5 | 10.39 |
| | GVIKPWMGGEISLR. | | | | | | | | | | | | |
| | S | | | | | | | | | | | | |
| 837 | R.GIDKQGALLLEQD | | 731.649 | 1 | 2923.573 | 2923.571 | 0 | 0.6 | 5513 | 630.5 | 630.5 | 630.5 | 10.39 |
| | GVIKPWMGGEISLR. | | | | | | | | | | | | |
| | S | | | | | | | | | | | | |
| 837 | R.GIDKQGALLLEQD | | 731.648 | 4 | 2923.571 | 2923.571 | 0 | 0.0 | 5513 | 622.4 | 622.4 | 622.4 | 10.39 |
| | GVIKPWMGGEISLR. | | | | | | | | | | | | |
| | S | | | | | | | | | | | | |
| 837 | R.GIDKQGALLLEQD | | 731.648 | 4 | 2923.572 | 2923.571 | 0 | 0.3 | 5513 | 617.2 | 617.2 | 617.2 | 10.39 |
| | GVIKPWMGGEISLR. | | | | | | | | | | | | |
| | S | | | | | | | | | | | | |
| 837 | R.GIDKQGALLLEQD | | 731.649 | 4 | 2923.572 | 2923.571 | 0 | 0.3 | 5513 | 611.0 | 611.0 | 611.0 | 10.39 |
| | GVIKPWMGGEISLR. | | | | | | | | | | | | |
| | S | | | | | | | | | | | | |
| 837 | R.GIDKQGALLLEQD | | 731.649 | 4 | 2923.572 | 2923.571 | 0 | 0.4 | 5513 | 600.9 | 600.9 | 600.9 | 10.39 |
| | GVIKPWMGGEISLR. | | | | | | | | | | | | |
| | S | | | | | | | | | | | | |
| 837 | R.GIDKQGALLLEQD | | 731.648 | 4 | 2923.572 | 2923.571 | 0 | 0.2 | 5513 | 599.0 | 599.0 | 599.0 | 9.39 |
| | GVIKPWMGGEISLR. | | | | | | | | | | | | |
| | S | | | | | | | | | | | | |
| 837 | R.GIDKQGALLLEQD | | 731.648 | 4 | 2923.571 | 2923.571 | 0 | 0.1 | 5513 | 597.7 | 597.7 | 597.7 | 9.39 |
| | GVIKPWMGGEISLR. | | | | | | | | | | | | |
| | S | | | | | | | | | | | | |
| 837 | R.GIDKQGALLLEQD | | 731.649 | 4 | 2923.573 | 2923.571 | 0 | 0.5 | 5513 | 595.0 | 595.0 | 595.0 | 9.39 |
| | GVIKPWMGGEISLR. | | | | | | | | | | | | |
| | S | | | | | | | | | | | | |
| 837 | R.GIDKQGALLLEQD | | 731.899 | 4 | 2924.575 | 2923.571 | 1 | 0.1 | 5513 | 593.5 | 593.5 | 593.5 | 9.39 |
| | GVIKPWMGGEISLR. | | | | | | | | | | | | |
| | S | | | | | | | | | | | | |
| 837 | R.GIDKQGALLLEQD | | 731.649 | 4 | 2923.573 | 2923.571 | 0 | 0.5 | 5513 | 591.7 | 1591.7 | 591.7 | 9.39 |
| | GVIKPWMGGEISLR. | | | | | | | | | | | | |
| | S | | | | | | | | | | | | |
| 837 | R.GIDKQGALLLEQD | | 731.649 | 4 | 2923.573 | 2923.571 | 0 | 0.6 | 5513 | 590.5 | 590.5 | 590.5 | 9.39 |
| | GVIKPWMGGEISLR. | | | | | | | | | | | | |
| | S | | | | | | | | | | | | |
| 837 | R.GIDKQGALLLEQD | | 975.196 | 3 | 2923.573 | 2923.571 | 0 | 0.5 | 5513 | 584.2 | 584.2 | 584.2 | 8.66 |
| | GVIKPWMGGEISLR. | | | | | | | | | | | | |
| | S | | | | | | | | | | | | |
| 837 | R.GIDKQGALLLEQD | | 731.899 | 4 | 2924.574 | 2923.571 | 1 | −0.2 | 5513 | 573.4 | 573.4 | 573.4 | 9.39 |
| | GVIKPWMGGEISLR. | | | | | | | | | | | | |
| | S | | | | | | | | | | | | |
| 837 | R.GIDKQGALLLEQD | | 731.648 | 4 | 2923.572 | 2923.571 | 0 | 0.3 | 5513 | 565.6 | 565.6 | 565.6 | 9.39 |
| | GVIKPWMGGEISLR. | | | | | | | | | | | | |
| | S | | | | | | | | | | | | |
| 1612 | R.GIDKQGALLLEQD | M[+16] | 735.648 | 4 | 2939.568 | 2939.566 | 0 | 0.8 | 5513 | 563.2 | 563.2 | 563.2 | 9.39 |
| | GVIKPWM | | | | | | | | | | | | |
| | [+15.995]GG | | | | | | | | | | | | |
| | EISLR.S | | | | | | | | | | | | |
| 837 | R.GIDKQGALLLEQD | | 731.648 | 4 | 2923.572 | 2923.571 | 0 | 0.2 | 5513 | 562.2 | 562.2 | 562.2 | 9.39 |
| | GVIKPWMGGEISLR. | | | | | | | | | | | | |
| | S | | | | | | | | | | | | |
| 1612 | R.GIDKQGALLLEQD | M[+16] | 735.898 | 4 | 2940.570 | 2939.566 | 1 | 0.3 | 5513 | 557.6 | 557.6 | 557.6 | 8.55 |
| | GVIKPWM | | | | | | | | | | | | |
| | [+15.995] | | | | | | | | | | | | |
| | GGEISLR.S | | | | | | | | | | | | |
| 1612 | R.GIDKQGALLLEQD | M[+16] | 735.898 | 4 | 2940.570 | 2939.566 | 1 | 0.1 | 5513 | 557.5 | 557.5 | 557.5 | 7.82 |
| | GVIKPWM | | | | | | | | | | | | |
| | [+15.995]GGE | | | | | | | | | | | | |
| | ISLR.S | | | | | | | | | | | | |
| 837 | R.GIDKQGALLLEQD | | 731.899 | 4 | 2924.576 | 2923.571 | 1 | 0.5 | 5513 | 548.1 | 548.1 | 548.1 | 7.82 |
| | GVIKPWMGGEISLR. | | | | | | | | | | | | |
| | S | | | | | | | | | | | | |
| 837 | R.GIDKQGALLLEQD | | 731.898 | 4 | 2924.571 | 2923.571 | 1 | −1.1 | 5513 | 544.0 | 544.0 | 544.0 | 7.11 |
| | GVIKPWMGGEISLR. | | | | | | | | | | | | |
| | S | | | | | | | | | | | | |
| 837 | R.GIDKQGALLLEQD | | 975.862 | 3 | 2925.571 | 2923.571 | 2 | 2.2 | 5513 | 542.9 | 542.9 | 542.9 | 6.87 |
| | GVIKPWMGGEISLR. | | | | | | | | | | | | |
| | S | | | | | | | | | | | | |
| 837 | R.GIDKQGALLLEQD | | 731.649 | 4 | 2923.572 | 2923.571 | 0 | 0.3 | 5513 | 541.9 | 541.9 | 541.9 | 8.55 |
| | GVIKPWMGGEISLR. | | | | | | | | | | | | |
| | S | | | | | | | | | | | | |
| 837 | R.GIDKQGALLLEQD | | 731.648 | 4 | 2923.571 | 2923.571 | 0 | 0.1 | 5513 | 540.0 | 540.0 | 540.0 | 8.55 |
| | GVIKPWMGGEISLR. | | | | | | | | | | | | |
| | S | | | | | | | | | | | | |
| 837 | R.GIDKQGALLLEQD | | 731.648 | 4 | 2923.571 | 2923.571 | 0 | 0.0 | 5513 | 526.3 | 526.3 | 526.3 | 7.82 |
| | GVIKPWMGGEISLR. | | | | | | | | | | | | |
| | S | | | | | | | | | | | | |
| 837 | R.GIDKQGALLLEQD | | 731.900 | 4 | 2924.578 | 2923.571 | 1 | 1.2 | 5513 | 510.8 | 510.8 | 510.8 | 7.61 |
| | GVIKPWMGGEISLR. | | | | | | | | | | | | |
| | S | | | | | | | | | | | | |
| 837 | R.GIDKQGALLLEQD | | 731.648 | 4 | 2923.572 | 2923.571 | 0 | 0.3 | 5513 | 508.1 | 508.1 | 508.1 | 7.36 |
| | GVIKPWMGGEISLR. | | | | | | | | | | | | |
| | S | | | | | | | | | | | | |
| 1612 | R.GIDKQGALLLEQD | M[+16] | 735.647 | 4 | 2939.567 | 2939.566 | 0 | 0.2 | 5513 | 506.8 | 506.8 | 506.8 | 8.34 |
| | GVIKPWM | | | | | | | | | | | | |
| | [+15.995]GGEI | | | | | | | | | | | | |
| | SLR.S | | | | | | | | | | | | |
| 837 | R.GIDKQGALLLEQD | | 731.649 | 4 | 2923.572 | 2923.571 | 0 | 0.4 | 5513 | 496.9 | 496.9 | 496.9 | 7.36 |
| | GVIKPWMGGEISLR. | | | | | | | | | | | | |
| | S | | | | | | | | | | | | |
| 837 | R.GIDKQGALLLEQD | | 731.649 | 4 | 2923.573 | 2923.571 | 0 | 0.7 | 5513 | 494.8 | 494.8 | 494.8 | 7.61 |
| | GVIKPWMGGEISLR. | | | | | | | | | | | | |
| | S | | | | | | | | | | | | |
| 837 | R.GIDKQGALLLEQD | | 1462.289 | 2 | 2923.570 | 2923.571 | 0 | −0.3 | 5513 | 494.4 | 494.4 | 494.4 | 6.96 |
| | GVIKPWMGGEISLR. | | | | | | | | | | | | |
| | S | | | | | | | | | | | | |
| 837 | R.GIDKQGALLLEQD | | 731.648 | 4 | 2923.572 | 2923.571 | 0 | 0.3 | 5513 | 485.8 | 485.8 | 485.8 | 7.36 |
| | GVIKPWMGGEISLR. | | | | | | | | | | | | |
| | S | | | | | | | | | | | | |
| 837 | R.GIDKQGALLLEQD | | 731.649 | 4 | 2923.574 | 2923.571 | 0 | 0.8 | 5513 | 485.0 | 485.0 | 485.0 | 17.61 |
| | GVIKPWMGGEISLR. | | | | | | | | | | | | |
| | S | | | | | | | | | | | | |
| 837 | R.GIDKQGALLLEQD | | 731.649 | 4 | 2923.573 | 2923.571 | 0 | 0.6 | 5513 | 484.4 | 484.4 | 484.4 | 7.61 |
| | GVIKPWMGGEISLR. | | | | | | | | | | | | |
| | S | | | | | | | | | | | | |
| 837 | R.GIDKQGALLLEQD | | 731.648 | 4 | 2923.572 | 2923.571 | 0 | 0.2 | 5513 | 484.3 | 484.3 | 484.3 | 7.61 |
| | GVIKPWMGGEISLR. | | | | | | | | | | | | |
| | S | | | | | | | | | | | | |
| 837 | R.GIDKQGALLLEQD | | 731.648 | 4 | 2923.569 | 2923.571 | 0 | −0.6 | 5513 | 479.0 | 479.0 | 479.0 | 6.18 |
| | GVIKPWMGGEISLR. | | | | | | | | | | | | |
| | S | | | | | | | | | | | | |
| 837 | R.GIDKQGALLLEQD | | 731.649 | 4 | 2923.572 | 2923.571 | 0 | 0.3 | 5513 | 462.8 | 462.8 | 462.8 | 8.09 |
| | GVIKPWMGGEISLR. | | | | | | | | | | | | |
| | S | | | | | | | | | | | | |
| 1612 | R.GIDKQGALLLEQD | M[+16] | 735.897 | 4 | 2940.567 | 2939.566 | 1 | 0.7 | 5513 | 406.3 | 406.3 | 406.3 | 6.07 |
| | GVIKPWM | | | | | | | | | | | | |
| | [+15.995]G | | | | | | | | | | | | |
| | GEISLR.S | | | | | | | | | | | | |
| 837 | R.GIDKQGALLLEQD | | 975.195 | 3 | 2923.570 | 2923.571 | 0 | 0.3 | 5513 | 397.9 | 397.9 | 397.9 | 6.43 |
| | GVIKPWMGGEISLR. | | | | | | | | | | | | |
| | S | | | | | | | | | | | | |
| 837 | R.GIDKQGALLLEQD | | 731.899 | 4 | 2924.575 | 2923.571 | 1 | 0.3 | 5513 | 395.2 | 395.2 | 395.2 | 6.67 |
| | GVIKPWMGGEISLR. | | | | | | | | | | | | |
| | S | | | | | | | | | | | | |
| 837 | R.GIDKQGALLLEQD | | 731.650 | 4 | 2923.578 | 2923.571 | 0 | 2.3 | 5513 | 374.0 | 374.0 | 374.0 | 6.90 |
| | GVIKPWMGGEISLR. | | | | | | | | | | | | |
| | S | | | | | | | | | | | | |
| 837 | R.GIDKQGALLLEQD | | 731.649 | 4 | 2923.573 | 2923.571 | 0 | 0.6 | 5513 | 355.8 | 355.8 | 355.8 | 5.51 |
| | GVIKPWMGGEISLR. | | | | | | | | | | | | |
| | S | | | | | | | | | | | | |
| 837 | R.GIDKQGALLLEQD | | 731.649 | 4 | 2923.573 | 2923.571 | 0 | 0.6 | 5513 | 332.0 | 332.0 | 332.0 | 5.28 |
| | GVIKPWMGGEISLR. | | | | | | | | | | | | |
| | S | | | | | | | | | | | | |
| 837 | R.GIDKQGALLLEQD | | 731.649 | 4 | 2923.573 | 2923.571 | 0 | 0.5 | 5513 | 326.9 | 326.9 | 326.9 | 5.51 |
| | GVIKPWMGGEISLR. | | | | | | | | | | | | |
| | S | | | | | | | | | | | | |
| 837 | R.GIDKQGALLLEQD | | 732.150 | 4 | 2925.579 | 2923.571 | 2 | 0.3 | 5513 | 307.5 | 307.5 | 307.5 | 5.04 |
| | GVIKPWMGGEISLR. | | | | | | | | | | | | |
| | S | | | | | | | | | | | | |
| 915 | K.QGALLLEQDGVIK | | 837.452 | 3 | 2510.342 | 2510.344 | 0 | −0.6 | 5517 | 325.8 | 194.5 | 194.5 | 4.35 |
| | PWMGGEISLR.S | | | | | | | | | | | | |
| 864 | R.SAEKLQLPPLER. | | 690.896 | 2 | 1380.784 | 1380.785 | 0 | 0.3 | 5540 | 695.3 | 695.3 | 695.3 | 10.69 |
| | L | | | | | | | | | | | | |
| 864 | R.SAEKLQLPPLER. | | 690.896 | 2 | 1380.785 | 1380.785 | 0 | 0.1 | 5540 | 646.2 | 646.2 | 646.2 | 10.40 |
| | L | | | | | | | | | | | | |
| 864 | R.SAEKLQLPPLER. | | 690.896 | 2 | 1380.784 | 1380.785 | 0 | −0.3 | 5540 | 643.0 | 643.0 | 643.0 | 9.69 |
| | L | | | | | | | | | | | | |
| 864 | R.SAEKLQLPPLER. | | 690.896 | 2 | 1380.784 | 1380.785 | 0 | 0.3 | 5540 | 623.6 | 623.6 | 623.6 | 9.69 |
| | L | | | | | | | | | | | | |
| 864 | R.SAEKLQLPPLER. | | 690.896 | 2 | 1380.785 | 1380.785 | 0 | 0.1 | 5540 | 603.3 | 603.3 | 603.3 | 10.40 |
| | L | | | | | | | | | | | | |
| 864 | R.SAEKLQLPPLER. | | 460.933 | 3 | 1380.784 | 1380.785 | 0 | −0.1 | 5540 | 543.5 | 543.5 | 543.5 | 7.83 |
| | L | | | | | | | | | | | | |
| 864 | R.SAEKLQLPPLER. | | 460.933 | 3 | 1380.785 | 1380.785 | 0 | 0.0 | 5540 | 492.2 | 492.2 | 492.2 | 7.62 |
| | L | | | | | | | | | | | | |
| 864 | R.SAEKLQLPPLER. | | 460.933 | 3 | 1380.785 | 1380.785 | 0 | 0.1 | 5540 | 462.2 | 462.2 | 462.2 | 7.13 |
| | L | | | | | | | | | | | | |
| 864 | R.SAEKLQLPPLER. | | 460.933 | 3 | 1380.785 | 1380.785 | 0 | 0.4 | 5540 | 404.0 | 404.0 | 404.0 | 7.03 |
| | L | | | | | | | | | | | | |
| 864 | R.SAEKLQLPPLER. | | 460.933 | 3 | 1380.785 | 1380.785 | 0 | 0.1 | 5540 | 401.2 | 401.2 | 401.2 | 7.03 |
| | L | | | | | | | | | | | | |
| 4650 | R.SAEKLQLPPLERL | | 912.017 | 2 | 1823.026 | 1823.027 | 0 | −0.5 | 5540 | 392.7 | 392.7 | 392.7 | 6.26 |
| | TLD.- | | | | | | | | | | | | |
| 864 | R.SAEKLQLPPLER. | | 460.933 | 3 | 1380.785 | 1380.785 | 0 | 0.1 | 5540 | 371.0 | 371.0 | 371.0 | 6.91 |
| | L | | | | | | | | | | | | |
| 864 | R.SAEKLQLPPLER. | | 460.933 | 3 | 1380.785 | 1380.785 | 0 | 0.0 | 5540 | 356.1 | 356.1 | 356.1 | 5.52 |
| | L | | | | | | | | | | | | |
| 4651 | K.LQLPPLERLTLD. | | 704.414 | 2 | 1407.821 | 1407.821 | 0 | 0.0 | 5544 | 459.2 | 459.2 | 459.2 | 7.38 |
| | - | | | | | | | | | | | | |
| 1905 | K.LQLPPLER.L | | 483.293 | 2 | 965.578 | 965.578 | 0 | 0.0 | 5544 | 402.1 | 402.1 | 402.1 | 6.99 |
| 1905 | K.LQLPPLER.L | | 483.293 | 2 | 965.578 | 965.578 | 0 | 0.0 | 5544 | 378.4 | 378.4 | 378.4 | 6.72 |
| 1905 | K.LQLPPLER.L | | 483.293 | 2 | 965.578 | 965.578 | 0 | 0.2 | 5544 | 351.1 | 351.1 | 351.1 | 5.33 |

TABLE 8
RNF213 Peptides Rep 2

| | | | | | | | | | Start- | | | | |
|---|---|---|---|---|---|---|---|---|---|---|---|---|---|
| SEQ | | Modifi- | | | | Calc. | Off- | Mass | ing | | | | |
| ID | Peptide | cation | Observed | | Observed | mass | by-x | error | posi- | | | Delta | \|Log |
| NO: | <ProteinMetrics Confidential> | Type(s) | m/z | Z | (M + H) | (M + H) | error | (ppm) | tion | Score | Delta | Mod | Prob\| |
| 880 | K.ASWTVQESK.K | | 518.259 | 2 | 1035.511 | 1035.511 | 0 | 0.1 | 81 | 454.7 | 454.7 | 454.7 | 7.76 |
| 880 | K.ASWTVQESK.K | | 518.259 | 2 | 1035.510 | 1035.511 | 0 | 0.4 | 81 | 392.3 | 392.3 | 392.3 | 6.64 |
| 884 | R.GLSQEGTGPPTSAGEGHSR.T | | 608.955 | 3 | 1824.849 | 1824.847 | 0 | 1.1 | 215 | 782.9 | 782.9 | 782.9 | 13.98 |
| 884 | R.GLSQEGTGPPTSAGEGHSR.T | | 912.928 | 2 | 1824.848 | 1824.847 | 0 | 0.3 | 215 | 774.1 | 774.1 | 774.1 | 13.98 |
| 884 | R.GLSQEGTGPPTSAGEGHSR.T | | 608.954 | 3 | 1824.847 | 1824.847 | 0 | 0.2 | 215 | 675.0 | 675.0 | 675.0 | 11.98 |
| 1079 | R.GLSQEGTGPPTSAGEGHSRTEDAAQELLLPESK.G | | 1117.211 | 3 | 3349.617 | 3349.614 | 0 | 0.9 | 215 | 637.5 | 637.5 | 637.5 | 9.99 |
| 884 | R.GLSQEGTGPPTSAGEGHSR.T | | 608.954 | 3 | 1824.847 | 1824.847 | 0 | 0.1 | 215 | 565.5 | 565.5 | 565.5 | 9.38 |
| 884 | R.GLSQEGTGPPTSAGEGHSR.T | | 608.954 | 3 | 1824.847 | 1824.847 | 0 | 0.1 | 215 | 501.2 | 501.2 | 501.2 | 9.07 |
| 1079 | R.GLSQEGTGPPTSAGEGHSRTEDAAQELLLPESK.G | | 1117.210 | 3 | 3349.614 | 3349.614 | 0 | 0.1 | 215 | 599.6 | 599.6 | 599.6 | 8.99 |
| 1079 | R.GLSQEGTGPPTSAGEGHSRTEDAAQELLLPESK.G | | 1117.210 | 3 | 3349.616 | 3349.614 | 0 | 0.6 | 215 | 578.5 | 578.5 | 578.5 | 8.99 |
| 884 | R.GLSQEGTGPPTSAGEGHSR.T | | 608.954 | 3 | 1824.848 | 1824.847 | 0 | 0.6 | 215 | 383.6 | 383.6 | 383.6 | 7.97 |
| 1079 | R.GLSQEGTGPPTSAGEGHSRTEDAAQELLLPESK.G | | 838.159 | 4 | 3349.614 | 3349.614 | 0 | 0.2 | 215 | 506.9 | 506.9 | 506.9 | 7.50 |
| 1079 | R.GLSQEGTGPPTSAGEGHSRTEDAAQELLLPESK.G | | 838.159 | 4 | 3349.614 | 3349.614 | 0 | 0.2 | 215 | 496.8 | 496.8 | 496.8 | 7.50 |
| 884 | R.GLSQEGTGPPTSAGEGHSR.T | | 456.967 | 4 | 1824.846 | 1824.847 | 0 | 0.5 | 215 | 449.4 | 449.4 | 449.4 | 7.21 |
| 842 | R.GLSQEGTGPPTSAGEGHSRTEDAAQELLLPESKGGSSEPGTELQT | | 970.894 | 7 | 6790.213 | 6790.214 | 0 | −0.3 | 215 | 603.1 | 603.1 | 603.1 | 6.34 |
| | TEQQAGASASMAVDAVAEPANAVK.G | | | | | | | | | | | | |
| 1079 | R.GLSQEGTGPPTSAGEGHSRTEDAAQELLLPESK.G | | 670.729 | 5 | 3349.617 | 3349.614 | 0 | 0.7 | 215 | 475.6 | 475.6 | 475.6 | 6.33 |
| 1079 | R.GLSQEGTGPPTSAGEGHSRTEDAAQELLLPESK.G | | 838.159 | 4 | 3349.614 | 3349.614 | 0 | −0.2 | 215 | 410.1 | 410.1 | 410.1 | 6.04 |
| 1079 | R.GLSQEGTGPPTSAGEGHSRTEDAAQELLLPESK.G | | 670.729 | 5 | 3349.616 | 3349.614 | 0 | 0.5 | 215 | 383.0 | 383.0 | 383.0 | 5.99 |
| 1079 | R.GLSQEGTGPPTSAGEGHSRTEDAAQELLLPESK.G | | 670.730 | 5 | 3349.618 | 3349.614 | 0 | 1.2 | 215 | 376.8 | 376.8 | 376.8 | 5.99 |
| 1467 | R.GLSQEGTGPPTSAGEGHS[+79.966]RTEDAAQELLLPESK.G | S[+80] | 858.150 | 4 | 3429.578 | 3429.581 | 0 | −0.8 | 215 | 399.1 | 399.1 | 48.1 | 5.92 |
| 842 | R.GLSQEGTGPPTSAGEGHSRTEDAAQELLLPESKGGSSEPGTELQT | | 1358.849 | 5 | 6790.216 | 6790.214 | 0 | 0.2 | 215 | 466.2 | 466.2 | 466.2 | 5.38 |
| | TEQQAGASASMAVDAVAEPANAVK.G | | | | | | | | | | | | |
| 1185 | R.TEDAAQELLLPESK.G | | 772.396 | 2 | 1543.785 | 1543.785 | 0 | 0.3 | 234 | 642.2 | 559.6 | 559.6 | 10.72 |
| 2915 | R.TEDAAQELLLPESKGGSSEPGTELQTTEQQAGASASMAVDAVAEP | | 1246.851 | 4 | 4984.384 | 4984.385 | 0 | −0.3 | 234 | 669.5 | 669.5 | 669.5 | 8.55 |
| | ANAVK.G | | | | | | | | | | | | |
| 1185 | R.TEDAAQELLLPESK.G | | 772.396 | 2 | 1543.785 | 1543.785 | 0 | −0.3 | 234 | 538.3 | 488.8 | 488.8 | 8.40 |
| 1185 | R.TEDAAQELLLPESK.G | | 515.267 | 3 | 1543.785 | 1543.785 | 0 | 0.2 | 234 | 411.2 | 377.8 | 377.8 | 7.02 |
| 1474 | R.TEDAAQELLLPESKGGS[+79.966]SEPGTELQT[+79.966]T | N[+1], | 1045.867 | 5 | 5225.303 | 5225.268 | 0 | 6.7 | 234 | 410.6 | 410.6 | 6.7 | 3.58 |
| | [+79.966]EQQAGASASMAVDAVAEPAN[+0.984]AVK.G | S[+80], | | | | | | | | | | | |
| | | T[+80]* | | | | | | | | | | | |
| | | 2 | | | | | | | | | | | |
| 1210 | K.GGSSEPGTELQTTEQQAGASASMAVDAVAEPANAVKGAGKEMK.E | | 1387.660 | 3 | 4160.964 | 4160.971 | 0 | −1.7 | 248 | 1006.2 | 949.1 | 949.1 | 30.00 |
| 1078 | K.GGSSEPGTELQTTEQQAGASASMAVDAVAEPANAVKGAGK.E | | 1258.268 | 3 | 3772.790 | 3772.793 | 0 | −0.8 | 248 | 920.2 | 920.2 | 920.2 | 15.35 |
| 1210 | K.GGSSEPGTELQTTEQQAGASASMAVDAVAEPANAVKGAGKEMK.E | | 1040.999 | 4 | 4160.974 | 4160.971 | 0 | 0.6 | 248 | 856.6 | 856.6 | 856.6 | 14.20 |
| 1210 | K.GGSSEPGTELQTTEQQAGASASMAVDAVAEPANAVKGAGKEMK.E | | 1387.995 | 3 | 4161.970 | 4160.971 | 1 | −1.1 | 248 | 867.9 | 867.9 | 681.3 | 13.61 |
| 1078 | K.GGSSEPGTELQTTEQQAGASASMAVDAVAEPANAVKGAGK.E | | 1258.269 | 3 | 3772.792 | 3772.793 | 0 | −0.4 | 248 | 811.4 | 811.4 | 811.4 | 13.41 |
| 1210 | K.GGSSEPGTELQTTEQQAGASASMAVDAVAEPANAVKGAGKEMK.E | | 1387.664 | 3 | 4160.978 | 4160.971 | 0 | 1.7 | 248 | 819.5 | 819.5 | 819.5 | 13.19 |
| 1066 | K.GGSSEPGTELQTTEQQAGASASMAVDAVAEPANAVK.G | | 1153.878 | 3 | 3459.619 | 3459.618 | 0 | 0.2 | 248 | 751.2 | 751.2 | 751.2 | 12.75 |
| 1078 | K.GGSSEPGTELQTTEQQAGASASMAVDAVAEPANAVKGAGK.E | | 755.365 | 5 | 3772.794 | 3772.793 | 0 | 0.1 | 248 | 783.9 | 783.9 | 783.9 | 12.47 |
| 1078 | K.GGSSEPGTELQTTEQQAGASASMAVDAVAEPANAVKGAGK.E | | 943.952 | 4 | 3772.785 | 3772.793 | 0 | −2.1 | 248 | 777.8 | 777.8 | 777.8 | 11.89 |
| 1066 | K.GGSSEPGTELQTTEQQAGASASMAVDAVAEPANAVK.G | | 1153.878 | 3 | 3459.619 | 3459.618 | 0 | 0.2 | 248 | 743.5 | 743.5 | 743.5 | 11.75 |
| 1567 | K.GGSSEPGTELQTTEQQAGASASM[+15.995]AVDAVAEPANAVK. | M[+16] | 1159.210 | 3 | 3475.616 | 3475.613 | 0 | 0.7 | 248 | 721.8 | 721.8 | 721.8 | 11.75 |
| | G | | | | | | | | | | | | |
| 1066 | K.GGSSEPGTELQTTEQQAGASASMAVDAVAEPANAVK.G | | 1153.878 | 3 | 3459.620 | 3459.618 | 0 | 0.5 | 248 | 701.1 | 694.2 | 694.2 | 11.75 |
| 1078 | K.GGSSEPGTELQTTEQQAGASASMAVDAVAEPANAVKGAGK.E | | 943.954 | 4 | 3772.795 | 3772.793 | 0 | 0.5 | 248 | 740.2 | 740.2 | 740.2 | 11.47 |
| 1210 | K.GGSSEPGTELQTTEQQAGASASMAVDAVAEPANAVKGAGKEMK.E | | 1041.250 | 4 | 4161.978 | 4160.971 | 1 | 0.8 | 248 | 735.9 | 735.9 | 484.3 | 11.20 |
| 1210 | K.GGSSEPGTELQTTEQQAGASASMAVDAVAEPANAVKGAGKEMK.E | | 1040.999 | 4 | 4160.973 | 4160.971 | 0 | 0.3 | 248 | 718.4 | 564.8 | 564.8 | 11.20 |
| 1066 | K.GGSSEPGTELQTTEQQAGASASMAVDAVAEPANAVK.G | | 865.660 | 4 | 3459.618 | 3459.618 | 0 | 0.1 | 248 | 678.0 | 678.0 | 678.0 | 10.75 |
| 1567 | K.GGSSEPGTELQTTEQQAGASASM[+15.995]AVDAVAEPANAVK. | M[+16] | 1159.209 | 3 | 3475.614 | 3475.613 | 0 | 0.2 | 248 | 659.7 | 659.7 | 659.7 | 10.75 |
| | G | | | | | | | | | | | | |
| 1078 | K.GGSSEPGTELQTTEQQAGASASMAVDAVAEPANAVKGAGK.E | | 943.955 | 4 | 3772.797 | 3772.793 | 0 | 1.1 | 248 | 696.4 | 696.4 | 696.4 | 10.47 |
| 1567 | K.GGSSEPGTELQTTEQQAGASASM[+15.995]AVDAVAEPANAVK. | M[+16] | 1159.208 | 3 | 3475.610 | 3475.613 | 0 | −0.7 | 248 | 699.6 | 694.3 | 694.3 | 10.16 |
| | G | | | | | | | | | | | | |
| 1066 | K.GGSSEPGTELQTTEQQAGASASMAVDAVAEPANAVK.G | | 1154.546 | 3 | 3461.623 | 3459.618 | 2 | −0.6 | 248 | 672.1 | 638.8 | 375.1 | 10.16 |
| 1066 | K.GGSSEPGTELQTTEQQAGASASMAVDAVAEPANAVK.G | | 865.661 | 4 | 3459.620 | 3459.618 | 0 | 0.7 | 248 | 656.7 | 656.7 | 656.7 | 10.15 |
| 1210 | K.GGSSEPGTELQTTEQQAGASASMAVDAVAEPANAVKGAGKEMK.E | | 694.335 | 6 | 4160.973 | 4160.971 | 0 | 0.3 | 248 | 696.8 | 696.8 | 696.8 | 9.68 |
| 1567 | K.GGSSEPGTELQTTEQQAGASASM[+15.995]AVDAVAEPANAVK. | M[+16] | 1159.878 | 3 | 3477.620 | 3475.613 | 2 | 0.1 | 248 | 591.8 | 591.8 | 288.2 | 8.75 |
| | G | | | | | | | | | | | | |
| 1066 | K.GGSSEPGTELQTTEQQAGASASMAVDAVAEPANAVK.G | | 1154.211 | 3 | 3460.620 | 3459.618 | 1 | −0.5 | 248 | 566.2 | 533.2 | 369.0 | 8.16 |
| 1066 | K.GGSSEPGTELQTTEQQAGASASMAVDAVAEPANAVK.G | | 1154.212 | 3 | 3460.622 | 3459.618 | 1 | 0.3 | 248 | 567.0 | 567.0 | 392.4 | 8.15 |
| 1210 | K.GGSSEPGTELQTTEQQAGASASMAVDAVAEPANAVKGAGKEMK.E | | 694.335 | 6 | 4160.971 | 4160.971 | 0 | 0.1 | 248 | 637.9 | 487.8 | 487.8 | 8.08 |
| 1066 | K.GGSSEPGTELQTTEQQAGASASMAVDAVAEPANAVK.G | | 866.161 | 4 | 3461.621 | 3459.618 | 2 | −1.1 | 248 | 597.6 | 425.5 | 274.4 | 7.57 |
| 1066 | K.GGSSEPGTELQTTEQQAGASASMAVDAVAEPANAVK.G | | 1154.211 | 3 | 3460.620 | 3459.618 | 1 | −0.5 | 248 | 582.9 | 567.6 | 380.3 | 7.57 |
| 1066 | K.GGSSEPGTELQTTEQQAGASASMAVDAVAEPANAVK.G | | 1154.211 | 3 | 3460.620 | 3459.618 | 1 | 0.5 | 248 | 586.4 | 486.7 | 345.6 | 7.28 |
| 1210 | K.GGSSEPGTELQTTEQQAGASASMAVDAVAEPANAVKGAGKEMK.E | | 832.999 | 5 | 4160.966 | 4160.971 | 0 | −1.3 | 248 | 613.2 | 396.9 | 396.9 | 7.21 |
| 1210 | K.GGSSEPGTELQTTEQQAGASASMAVDAVAEPANAVKGAGKEMK.E | | 833.201 | 5 | 4161.975 | 4160.971 | 1 | 0.2 | 248 | 560.7 | 454.8 | 293.9 | 6.79 |
| 1567 | K.GGSSEPGTELQTTEQQAGASASM[+15.995]AVDAVAEPANAVK. | M[+16] | 869.659 | 4 | 3475.613 | 3475.613 | 0 | −0.1 | 248 | 484.2 | 484.2 | 484.2 | 6.76 |
| | G | | | | | | | | | | | | |
| 1066 | K.GGSSEPGTELQTTEQQAGASASMAVDAVAEPANAVK.G | | 1154.212 | 3 | 3460.623 | 3459.618 | 1 | 0.4 | 248 | 476.0 | 363.5 | 282.0 | 6.60 |
| 1066 | K.GGSSEPGTELQTTEQQAGASASMAVDAVAEPANAVK.G | | 1154.213 | 3 | 3460.624 | 3459.618 | 1 | 0.8 | 248 | 449.6 | 449.6 | 278.8 | 6.60 |
| 1066 | K.GGSSEPGTELQTTEQQAGASASMAVDAVAEPANAVK.G | | 1153.877 | 3 | 3459.618 | 3459.618 | 0 | −0.1 | 248 | 403.9 | 403.9 | 403.9 | 6.18 |
| 1066 | K.GGSSEPGTELQTTEQQAGASASMAVDAVAEPANAVK.G | | 1154.214 | 3 | 3460.626 | 3459.618 | 1 | 1.4 | 248 | 421.6 | 374.2 | 99.2 | 5.89 |
| 1066 | K.GGSSEPGTELQTTEQQAGASASMAVDAVAEPANAVK.G | | 1153.882 | 3 | 3459.632 | 3459.618 | 0 | 4.1 | 248 | 471.9 | 447.1 | 447.1 | 5.00 |
| 1066 | K.GGSSEPGTELQTTEQQAGASASMAVDAVAEPANAVK.G | | 692.729 | 5 | 3459.617 | 3459.618 | 0 | 0.3 | 248 | 447.5 | 447.5 | 447.5 | 4.76 |
| 1066 | K.GGSSEPGTELQTTEQQAGASASMAVDAVAEPANAVK.G | | 1153.880 | 3 | 3459.626 | 3459.618 | 0 | 2.3 | 248 | 403.0 | 325.8 | 325.8 | 4.62 |
| 1066 | K.GGSSEPGTELQTTEQQAGASASMAVDAVAEPANAVK.G | | 1154.214 | 3 | 3460.628 | 3459.618 | 1 | 2.0 | 248 | 328.5 | 287.5 | 237.9 | 4.24 |
| 1066 | K.GGSSEPGTELQTTEQQAGASASMAVDAVAEPANAVK.G | | 1153.876 | 3 | 3459.614 | 3459.618 | C | −1.3 | 248 | 388.7 | 301.9 | 301.9 | 3.75 |
| 1066 | K.GGSSEPGTELQTTEQQAGASASMAVDAVAEPANAVK.G | | 1153.877 | 3 | 3459.617 | 3459.618 | 0 | −0.4 | 248 | 349.4 | 248.0 | 248.0 | 3.57 |
| 1567 | K.GGSSEPGTELQTTEQQAGASASM[+15.995]AVDAVAEPANAVK. | M[+16] | 869.658 | 4 | 3475.610 | 3475.613 | 0 | −0.9 | 248 | 321.2 | 197.1 | 197.1 | 3.31 |
| | G | | | | | | | | | | | | |
| 1066 | K.GGSSEPGTELQTTEQQAGASASMAVDAVAEPANAVK.G | | 1154.550 | 3 | 3461.636 | 3459.618 | 2 | 3.4 | 248 | 310.8 | 242.9 | 242.9 | 2.63 |
| 1725 | R.MKQPPATTPPFKTHC[+57.021]QEAETK.T | C[+57] | 607.551 | 4 | 2427.182 | 2427.180 | 0 | 1.1 | 296 | 627.1 | 627.1 | 627.1 | 10.36 |
| 1725 | R.MKQPPATTPPFKTHC[+57.021]QEAETK.T | C[+57] | 607.550 | 4 | 2427.180 | 2427.180 | 0 | 0.2 | 296 | 603.2 | 603.2 | 603.2 | 10.36 |
| 1662 | R.MKQPPATT[+79.966]PPFKTHC[+57.021]QEAETK.T | C[+57], | 627.793 | 4 | 2508.149 | 2507.146 | 1 | −0.1 | 296 | 581.3 | 581.3 | 48.3 | 9.36 |
| | | T[+80] | | | | | | | | | | | |
| 1725 | R.MKQPPATTPPFKTHC[+57.021]QEAETK.T | C[+57] | 486.242 | 5 | 2427.183 | 2427.180 | 0 | 1.3 | 296 | 568.1 | 568.1 | 568.1 | 9.36 |
| 1725 | R.MKQPPATTPPFKTHC[+57.021]QEAETK.T | C[+57] | 809.732 | 3 | 2427.181 | 2427.180 | 0 | 0.7 | 296 | 618.5 | 618.5 | 618.5 | 8.94 |
| 1666 | R.M[+15.995]KQPPATTPPFKTHC[+57.021]QEAETK.T | C[+57], | 611.550 | 4 | 2443.176 | 2443.174 | 0 | 0.6 | 296 | 543.2 | 543.2 | 543.2 | 8.62 |
| | | M[+16] | | | | | | | | | | | |
| 1666 | R.M[+15.995]KQPPATTPPFKTHC[+57.021]QEAETK.T | C[+57], | 611.549 | 4 | 2443.175 | 2443.174 | 0 | 0.1 | 296 | 484.4 | 484.4 | 484.4 | 8.44 |
| | | M[+16] | | | | | | | | | | | |
| 1666 | R.M[+15.995]KQPPATTPPFKTHC[+57.021]QEAETK.T | C[+57], | 489.441 | 5 | 2443.176 | 2443.174 | 0 | 0.6 | 296 | 474.7 | 474.7 | 474.7 | 8.29 |
| | | M[+16] | | | | | | | | | | | |
| 824 | R.MKQPPATTPPFK.T | | 671.863 | 2 | 1342.719 | 1342.719 | 0 | 0.1 | 296 | 539.3 | 539.3 | 539.3 | 8.12 |
| 824 | R.MKQPPATTPPFK.T | | 448.244 | 3 | 1342.719 | 1342.719 | 0 | 0.0 | 296 | 453.6 | 453.6 | 453.6 | 7.49 |
| 1666 | R.M[+15.995]KQPPATTPPFKTHC[+57.021]QEAETK.T | C[+57], | 489.441 | 5 | 2443.177 | 2443.174 | 0 | 0.9 | 296 | 422.8 | 422.8 | 422.8 | 7.47 |
| | | M[+16] | | | | | | | | | | | |
| 824 | R.MKQPPATTPPFK.T | | 671.863 | 2 | 1342.718 | 1342.719 | 0 | −0.7 | 296 | 515.1 | 515.1 | 515.1 | 7.35 |
| 824 | R.MKQPPATTPPFK.T | | 671.863 | 2 | 1342.718 | 1342.719 | 0 | 0.7 | 296 | 489.2 | 489.2 | 489.2 | 7.35 |
| 1539 | R.M[+15.995]KQPPATTPPFK.T | M[+16] | 679.861 | 2 | 1358.715 | 1358.714 | 0 | 0.6 | 296 | 420.5 | 420.5 | 420.5 | 7.26 |
| 1666 | R.M[+15.995]KQPPATTPPFKTHC[+57.021]QEAETK.T | C[+57], | 611.551 | 4 | 2443.181 | 2443.174 | 0 | 2.6 | 296 | 464.1 | 464.1 | 464.1 | 6.88 |
| | | M[+16] | | | | | | | | | | | |
| 824 | R.MKQPPATTPPFK.T | | 448.244 | 3 | 1342.718 | 1342.719 | 0 | −0.8 | 296 | 417.4 | 417.4 | 417.4 | 6.49 |
| 1539 | R.M[+15.995]KQPPATTPPFK.T | M[+16] | 453.576 | 3 | 1358.714 | 1358.714 | 0 | 0.3 | 296 | 405.8 | 318.9 | 318.9 | 5.83 |
| 1539 | R.M[+15.995]KQPPATTPPFK.T | M[+16] | 453.576 | 3 | 1358.714 | 1358.714 | 0 | 0.0 | 296 | 417.9 | 261.2 | 261.2 | 5.73 |
| 1666 | R.M[+15.995]KQPPATTPPFKTHC[+57.021]QEAETK.T | C[+57], | 815.062 | 3 | 2443.172 | 2443.174 | 0 | −1.0 | 296 | 432.2 | 432.2 | 432.2 | 5.46 |
| | | M[+16] | | | | | | | | | | | |
| 1539 | R.M[+15.995]KQPPATTPPFK.T | M[+16] | 679.861 | 2 | 1358.714 | 1358.714 | 0 | 0.4 | 296 | 321.6 | 229.0 | 229.0 | 5.38 |
| 1666 | R.M[+15.995]KQPPATTPPFKTHC[+57.021]QEAETK.T | C[+57], | 489.440 | 5 | 2443.172 | 2443.174 | 0 | −0.9 | 296 | 321.3 | 321.3 | 321.3 | 4.96 |
| | | M[+16] | | | | | | | | | | | |
| 1539 | R.M[+15.995]KQPPATTPPFK.T | M[+16] | 453.576 | 3 | 1358.713 | 1358.714 | 0 | −0.3 | 296 | 322.6 | 220.1 | 220.1 | 4.79 |
| 1539 | R.M[+15.995]KQPPATTPPFK.T | M[+16] | 453.576 | 3 | 1358.713 | 1358.714 | 0 | −0.2 | 296 | 361.2 | 147.0 | 147.0 | 4.74 |
| 1539 | R.M[+15.995]KQPPATTPPFK.T | M[+16] | 453.576 | 3 | 1358.713 | 1358.714 | 0 | −0.2 | 296 | 314.1 | 204.1 | 204.1 | 4.72 |
| 1690 | K.THC[+57.021]QEAETKTKDEMAAAEEK.V | C[+57] | 769.680 | 3 | 2307.024 | 2307.023 | 0 | 0.6 | 308 | 794.5 | 794.5 | 794.5 | 11.94 |
| 1690 | K.THC[+57.021]QEAETKTKDEMAAAEEK.V | C[+57] | 577.511 | 4 | 2307.023 | 2307.023 | 0 | 0.0 | 308 | 689.2 | 689.2 | 689.2 | 11.36 |
| 1667 | K.THC[+57.021]QEAETKTKDEM[+15.995]AAAEEK.V | C[+57], | 581.510 | 4 | 2323.018 | 2323.018 | 0 | 0.0 | 308 | 512.4 | 512.4 | 512.4 | 7.85 |
| | | M[+16] | | | | | | | | | | | |
| 1667 | K.THC[+57.021]QEAETKTKDEM[+15.995]AAAEEK.V | C[+57], | 581.510 | 4 | 2323.019 | 2323.018 | 0 | 0.4 | 308 | 373.5 | 373.5 | 373.5 | 7.06 |
| | | M[+16] | | | | | | | | | | | |
| 1690 | K.THC[+57.021]QEAETKTKDEMAAAEEK.V | C[+57] | 462.209 | 5 | 2307.018 | 2307.023 | 0 | −2.1 | 308 | 349.9 | 349.9 | 349.9 | 4.96 |
| 1690 | K.THC[+57.021]QEAETKTKDEMAAAEEK.V | C[+57] | 462.209 | 5 | 2307.018 | 2307.023 | 0 | −2.1 | 308 | 329.4 | 329.4 | 329.4 | 4.77 |
| 1357 | K.TKDEMAAAEEKVGK.N | | 502.920 | 3 | 1506.746 | 1506.747 | 0 | −0.3 | 317 | 698.2 | 585.0 | 585.0 | 10.51 |
| 1493 | K.VGKN[+0.984]EQGEPEDLKKPEGK.N | N[+1] | 496.506 | 4 | 1983.003 | 1983.003 | 0 | 0.2 | 328 | 387.9 | 387.9 | 101.7 | 7.35 |
| 2203 | K.NQEADVQEVK.A | | 580.283 | 2 | 1159.558 | 1159.559 | 0 | −0.5 | 360 | 426.8 | 426.8 | 426.8 | 6.57 |
| 1716 | R.GGEEFGESKWDSNIC[+57.021]ELHYTR.D | C[+57] | 629.280 | 4 | 2514.098 | 2514.099 | 0 | −0.3 | 404 | 497.4 | 497.4 | 497.4 | 7.61 |
| 1701 | K.WDSNIC[+57.021]ELHYTR.D | C[+57] | 531.909 | 3 | 1593.712 | 1593.712 | 0 | 0.2 | 413 | 409.4 | 409.4 | 409.4 | 7.35 |
| 1701 | K.WDSNIC[+57.021]ELHYTR.D | C[+57] | 531.908 | 3 | 1593.711 | 1593.712 | 0 | 0.5 | 413 | 447.6 | 447.6 | 447.6 | 6.99 |
| 994 | K.SSLLGSGDWHQYYDIVYMKPHGR.L | | 678.078 | 4 | 2709.288 | 2709.288 | 0 | 0.1 | 484 | 542.1 | 542.1 | 542.1 | 9.25 |
| 994 | K.SSLLGSGDWHQYYDIVYMKPHGR.L | | 542.663 | 5 | 2709.288 | 2709.288 | 0 | 0.0 | 484 | 504.7 | 504.7 | 504.7 | 9.07 |
| 2034 | R.LQKVMNHITDGPRK.D | | 409.979 | 4 | 1636.895 | 1636.895 | 0 | 0.1 | 507 | 386.7 | 386.7 | 386.7 | 6.80 |
| 860 | K.VMNHITDGPRKDLVK.G | | 431.489 | 4 | 1722.934 | 1722.932 | 0 | 1.4 | 510 | 410.4 | 410.4 | 410.4 | 7.20 |
| 860 | K.VMNHITDGPRKDLVK.G | | 574.982 | 3 | 1722.932 | 1722.932 | 0 | 0.0 | 510 | 554.7 | 554.7 | 554.7 | 6.94 |
| 1526 | K.VM[+15.995]NHITDGPRKDLVK.G | M[+16] | 435.487 | 4 | 1738.927 | 1738.927 | 0 | 0.3 | 510 | 363.8 | 363.8 | 363.8 | 6.80 |
| 860 | K.VMNHITDGPRKDLVK.G | | 431.488 | 4 | 1722.932 | 1722.932 | 0 | −0.2 | 510 | 397.8 | 397.8 | 397.8 | 6.21 |
| 860 | K.VMNHITDGPRKDLVK.G | | 574.982 | 3 | 1722.932 | 1722.932 | 0 | −0.1 | 510 | 518.0 | 518.0 | 518.0 | 6.17 |
| 860 | K.VMNHITDGPRKDLVK.G | | 574.982 | 3 | 1722.932 | 1722.932 | 0 | −0.1 | 510 | 504.4 | 504.4 | 504.4 | 6.17 |
| 860 | K.VMNHITDGPRKDLVK.G | | 431.489 | 4 | 1722.933 | 1722.932 | 0 | 0.5 | 510 | 353.5 | 353.5 | 353.5 | 5.76 |
| 860 | K.VMNHITDGPRKDLVK.G | | 861.970 | 2 | 1722.932 | 1722.932 | 0 | 0.1 | 510 | 368.7 | 368.7 | 368.7 | 5.19 |
| 1526 | K.VM[+15.995]NHITDGPRKDLVK.G | M[+16] | 580.314 | 3 | 1738.926 | 1738.927 | 0 | −0.3 | 510 | 392.8 | 392.8 | 392.8 | 4.60 |
| 1834 | K.RYLWQHLKK.H | | 424.584 | 3 | 1271.738 | 1271.737 | 0 | 0.9 | 588 | 315.6 | 315.6 | 315.6 | 3.93 |
| 2363 | R.YLWQHLK.K | | 494.274 | 2 | 987.541 | 987.541 | 0 | 0.4 | 589 | 477.1 | 477.1 | 477.1 | 6.80 |
| 907 | R.YLWQHLKK.H | | 558.322 | 2 | 1115.636 | 1115.636 | 0 | −0.1 | 589 | 418.1 | 418.1 | 418.1 | 5.65 |
| 907 | R.YLWQHLKK.H | | 558.322 | 2 | 1115.636 | 1115.636 | 0 | 0.0 | 589 | 310.9 | 310.9 | 310.9 | 3.74 |
| 1704 | K.STDFLPVDC[+57.021]PVR.S | C[+57] | 703.343 | 2 | 1405.678 | 1405.678 | 0 | 0.0 | 606 | 449.4 | 449.4 | 449.4 | 8.05 |
| 1704 | K.STDFLPVDC[+57.021]PVR.S | C[+57] | 469.231 | 3 | 1405.678 | 1405.678 | 0 | −0.1 | 606 | 456.2 | 401.8 | 401.8 | 7.05 |
| 812 | R.DLSHILGIPQSWR.L | | 507.944 | 3 | 1521.817 | 1521.817 | 0 | −0.3 | 661 | 398.4 | 398.4 | 398.4 | 6.83 |
| 1678 | R.TYTWLGALPVLHC[+57.021]C[+57.021]MELAPR.H | C[+57]* | 797.061 | 3 | 2389.169 | 2388.166 | 1 | −0.3 | 688 | 472.5 | 472.5 | 472.5 | 7.25 |
| | | 2 | | | | | | | | | | | |
| 2001 | R.HKDAWRQPEDTWAALEGLSFSPFR.E | | 569.683 | 5 | 2844.386 | 2844.385 | 0 | 0.2 | 708 | 335.3 | 279.7 | 279.7 | 5.43 |
| 2002 | K.DAWRQPEDTWAALEGLSFSPFR.E | | 860.416 | 3 | 2579.233 | 2579.231 | 0 | 0.4 | 710 | 369.3 | 369.3 | 369.3 | 7.02 |
| 2002 | K.DAWRQPEDTWAALEGLSFSPFR.E | | 860.416 | 3 | 2579.233 | 2579.231 | 0 | 0.4 | 710 | 338.6 | 338.6 | 338.6 | 5.70 |
| 1133 | R.QPEDTWAALEGLSFSPFREQMLDTSSLLQFMR.E | | 933.453 | 4 | 3730.792 | 3730.788 | 0 | 1.0 | 714 | 798.7 | 798.7 | 798.7 | 12.47 |
| 885 | R.QPEDTWAALEGLSFSPFR.E | | 1025.998 | 2 | 2050.988 | 2050.987 | 0 | 0.6 | 714 | 485.0 | 485.0 | 485.0 | 9.07 |
| 1133 | R.QPEDTWAALEGLSFSPFREQMLDTSSLLQFMR.E | | 1244.269 | 3 | 3730.792 | 3730.788 | 0 | 1.2 | 714 | 570.2 | 570.2 | 570.2 | 8.99 |
| 1133 | R.QPEDTWAALEGLSFSPFREQMLDTSSLLQFMR.E | | 933.454 | 4 | 3730.792 | 3730.788 | 0 | 1.1 | 714 | 634.3 | 634.3 | 634.3 | 8.88 |
| 885 | R.QPEDTWAALEGLSFSPFR.E | | 684.334 | 3 | 2050.988 | 2050.987 | 0 | 0.5 | 714 | 456.1 | 456.1 | 456.1 | 8.39 |
| 1133 | R.QPEDTWAALEGLSFSPFREQMLDTSSLLQFMR.E | | 1244.270 | 3 | 3730.794 | 3730.788 | 0 | 1.7 | 714 | 495.0 | 495.0 | 495.0 | 7.19 |
| 885 | R.QPEDTWAALEGLSFSPFR.E | | 684.334 | 3 | 2050.988 | 2050.987 | 0 | 0.3 | 714 | 340.1 | 340.1 | 340.1 | 5.84 |
| 1616 | R.QPEDTWAALEGLSFSPFREQM[+15.995]LDTSSLLQFMR.E | M[+16] | 937.452 | 4 | 3746.787 | 3746.783 | 0 | 1.0 | 714 | 451.6 | 241.5 | 109.8 | 4.60 |
| 949 | R.EQMLDTSSLLQFMR.E | | 849.913 | 2 | 1698.819 | 1698.819 | 0 | 0.1 | 732 | 615.9 | 615.9 | 615.9 | 10.72 |
| 949 | R.EQMLDTSSLLQFMR.E | | 566.945 | 3 | 1698.820 | 1698.819 | 0 | 0.7 | 732 | 569.7 | 569.7 | 569.7 | 9.20 |
| 1558 | R.EQM[+15.995]LDTSSLLQFMR.E | M[+16] | 572.276 | 3 | 1714.815 | 1714.814 | 0 | 0.4 | 732 | 388.9 | 388.9 | 388.9 | 6.90 |
| 1558 | R.EQM[+15.995]LDTSSLLQFMR.E | M[+16] | 857.911 | 2 | 1714.815 | 1714.814 | 0 | 0.9 | 732 | 333.1 | 333.1 | 252.8 | 5.91 |
| 1860 | R.EKQHLLSIDEPLFR.S | | 575.649 | 3 | 1724.934 | 1724.933 | 0 | 0.3 | 746 | 386.3 | 386.3 | 386.3 | 7.14 |
| 1860 | R.EKQHLLSIDEPLFR.S | | 431.989 | 4 | 1724.933 | 1724.933 | 0 | −0.1 | 746 | 311.2 | 311.2 | 311.2 | 5.35 |
| 2190 | K.QHLLSIDEPLFR.S | | 489.937 | 3 | 1467.796 | 1467.795 | 0 | 0.1 | 748 | 409.0 | 409.0 | 409.0 | 7.53 |
| 1226 | R.DETGNNSVQTVFQGTLAATKR.W | | 746.377 | 3 | 2237.115 | 2237.116 | 0 | 0.2 | 892 | 671.3 | 671.3 | 671.3 | 11.12 |
| 867 | R.LVEIQFPAEHGWKESLLGDMEWR.L | | 693.348 | 4 | 2770.368 | 2770.366 | 0 | 1.0 | 942 | 436.5 | 436.5 | 436.5 | 7.81 |
| 1882 | R.LVEIQFPAEHGWK.E | | 518.609 | 3 | 1553.811 | 1553.811 | 0 | 0.2 | 942 | 335.7 | 335.7 | 335.7 | 5.91 |
| 996 | K.GLEDSVAKTFEK.C | | 441.898 | 3 | 1323.679 | 1323.679 | 0 | 0.1 | 986 | 517.2 | 517.2 | 517.2 | 7.94 |
| 972 | K.FGIVLSAVITK.S | | 574.358 | 2 | 1147.709 | 1147.709 | 0 | 0.3 | 1025 | 508.1 | 508.1 | 508.1 | 8.21 |
| 913 | R.TADNFDDILKHLLTLADVK.H | | 714.721 | 3 | 2142.148 | 2142.144 | 0 | 1.6 | 1040 | 666.2 | 666.2 | 666.2 | 11.70 |
| 913 | R.TADNFDDILKHLLTLADVK.H | | 536.292 | 4 | 2142.145 | 2142.144 | 0 | 0.2 | 1040 | 539.9 | 539.9 | 539.9 | 8.97 |
| 1060 | K.HLLTLADVK.H | | 505.306 | 2 | 1009.604 | 1009.604 | 0 | 0.1 | 1050 | 523.6 | 523.6 | 523.6 | 8.10 |
| 1724 | R.LC[+57.021]GTDEKILANVTEDAKR.L | C[+57] | 678.349 | 3 | 2033.033 | 2033.033 | 0 | 0.1 | 1063 | 592.3 | 592.3 | 592.3 | 9.36 |
| 1724 | R.LC[+57.021]GTDEKILANVTEDAKR.L | C[+57] | 509.014 | 4 | 2033.033 | 2033.033 | 0 | −0.1 | 1063 | 571.3 | 571.3 | 571.3 | 9.36 |
| 951 | K.ILANVTEDAKR.L | | 615.346 | 2 | 1229.684 | 1229.685 | 0 | −0.4 | 1070 | 606.6 | 606.6 | 606.6 | 9.26 |
| 951 | K.ILANVTEDAKR.L | | 410.566 | 3 | 1229.685 | 1229.685 | 0 | 0.2 | 1070 | 507.9 | 507.9 | 507.9 | 7.94 |
| 829 | K.ILANVTEDAK.R | | 537.295 | 2 | 1073.583 | 1073.584 | 0 | 0.7 | 1070 | 509.0 | 381.6 | 381.6 | 7.62 |
| 951 | K.ILANVTEDAKR.L | | 410.567 | 3 | 1229.685 | 1229.685 | 0 | 0.3 | 1070 | 404.3 | 404.3 | 404.3 | 7.55 |
| 951 | K.ILANVTEDAKR.L | | 410.567 | 3 | 1229.685 | 1229.685 | 0 | 0.2 | 1070 | 459.3 | 394.0 | 394.0 | 7.49 |
| 951 | K.ILANVTEDAKR.L | | 410.567 | 3 | 1229.686 | 1229.685 | 0 | 0.6 | 1070 | 436.4 | 436.4 | 436.4 | 7.07 |
| 829 | K.ILANVTEDAK.R | | 537.295 | 2 | 1073.584 | 1073.584 | 0 | 0.2 | 1070 | 467.1 | 350.8 | 350.8 | 6.23 |
| 1772 | K.RLIAVADSVLTK.V | | 429.266 | 3 | 1285.784 | 1285.784 | 0 | 0.2 | 1080 | 496.1 | 496.1 | 496.1 | 8.21 |
| 2210 | R.LIAVADSVLTK.V | | 565.345 | 2 | 1129.682 | 1129.683 | 0 | −0.2 | 1081 | 418.2 | 418.2 | 418.2 | 7.24 |
| 2210 | R.LIAVADSVLTK.V | | 565.345 | 2 | 1129.683 | 1129.683 | 0 | 0.0 | 1081 | 436.6 | 332.3 | 332.3 | 6.30 |
| 2210 | R.LIAVADSVLTK.V | | 565.345 | 2 | 1129.682 | 1129.683 | 0 | −0.2 | 1081 | 458.7 | 342.3 | 342.3 | 5.94 |
| 1220 | K.VVGDLLSGTILVGQLELIIK.H | | 694.093 | 3 | 2080.264 | 2080.263 | 0 | 0.7 | 1092 | 490.2 | 490.2 | 490.2 | 8.55 |
| 1973 | K.HKNQFLDIWQLR.E | | 533.291 | 3 | 1597.860 | 1597.860 | 0 | −0.1 | 1112 | 404.5 | 404.5 | 404.5 | 7.26 |
| 2135 | K.NQFLDIWQLR.E | | 666.857 | 2 | 1332.707 | 1332.706 | 0 | 0.5 | 1114 | 488.1 | 488.1 | 488.1 | 8.21 |
| 2369 | K.NQFLDIWQLREK.S | | 530.619 | 3 | 1589.843 | 1589.844 | 0 | 0.1 | 1114 | 465.3 | 465.3 | 465.3 | 7.49 |
| 2135 | K.NQFLDIWQLR.E | | 444.907 | 3 | 1332.706 | 1332.706 | 0 | 0.4 | 1114 | 416.5 | 416.5 | 416.5 | 7.02 |
| 1729 | K.SLSPQDEQC[+57.021]AVEEALDWR.R | C[+57] | 1066.983 | 2 | 2132.958 | 2132.955 | 0 | 1.4 | 1126 | 582.7 | 582.7 | 582.7 | 9.98 |
| 1689 | K.SLSPQDEQC[+57.021]AVEEALDWRREELLLLK.K | C[+57] | 782.899 | 4 | 3128.575 | 3127.573 | 1 | −0.2 | 1126 | 318.9 | 318.9 | 318.9 | 4.15 |
| 989 | R.EELLLLKK.E | | 493.318 | 2 | 985.629 | 985.629 | 0 | −0.2 | 1145 | 514.1 | 514.1 | 514.1 | 7.94 |
| 2221 | R.EELLLLK.K | | 429.271 | 2 | 857.535 | 857.534 | 0 | 0.3 | 1145 | 458.6 | 458.6 | 458.6 | 7.76 |
| 989 | R.EELLLLKK.E | | 493.318 | 2 | 985.629 | 985.629 | 0 | 0.1 | 1145 | 536.2 | 536.2 | 536.2 | 7.64 |
| 1703 | R.C[+57.021]VDSLLK.M | C[+57] | 417.723 | 2 | 834.439 | 834.439 | 0 | 0.0 | 1156 | 456.4 | 456.4 | 456.4 | 7.38 |
| 1703 | R.C[+57.021]VDSLLK.M | C[+57] | 417.723 | 2 | 834.439 | 834.439 | 0 | 0.1 | 1156 | 451.1 | 451.1 | 451.1 | 7.38 |
| 926 | K.HLIQVDFGVLAVR.H | | 489.621 | 3 | 1466.848 | 1466.848 | 0 | 0.1 | 1169 | 382.1 | 382.1 | 382.1 | 7.42 |
| 1160 | R.HSQDLSSKRLNDTVTVR.L | | 489.762 | 4 | 1956.026 | 1956.026 | 0 | 0.1 | 1182 | 564.5 | 564.5 | 564.5 | 9.36 |
| 1160 | R.HSQDLSSKRLNDTVTVR.L | | 489.762 | 4 | 1956.026 | 1956.026 | 0 | 0.1 | 1182 | 384.6 | 384.6 | 384.6 | 7.35 |
| 1951 | K.RLNDTVTVR.L | | 537.307 | 2 | 1073.606 | 1073.606 | 0 | −0.2 | 1190 | 353.4 | 353.4 | 353.4 | 4.83 |
| 2114 | R.LNDTVTVR.L | | 459.256 | 2 | 917.505 | 917.505 | 0 | 0.0 | 1191 | 414.5 | 414.5 | 414.5 | 7.15 |
| 1917 | R.LSTSSNSQRATHYHLSSQVQEMAGK.I | | 687.585 | 4 | 2747.317 | 2747.317 | 0 | 0.0 | 1199 | 408.1 | 408.1 | 408.1 | 7.33 |
| 1917 | R.LSTSSNSQRATHYHLSSQVQEMAGK.I | | 687.585 | 4 | 2747.317 | 2747.317 | 0 | 0.0 | 1199 | 310.1 | 310.1 | 310.1 | 5.61 |
| 811 | R.ATHYHLSSQVQEMAGKIDLLR.D | | 600.314 | 4 | 2398.235 | 2397.234 | 1 | −1.1 | 1208 | 779.6 | 779.6 | 779.6 | 13.12 |
| 811 | R.ATHYHLSSQVQEMAGKIDLLR.D | | 600.064 | 4 | 2397.235 | 2397.234 | 0 | 0.1 | 1208 | 722.0 | 722.0 | 722.0 | 12.70 |
| 1012 | R.ATHYHLSSQVQEMAGK.I | | 596.290 | 3 | 1786.855 | 1786.854 | 0 | 0.4 | 1208 | 668.6 | 668.6 | 668.6 | 11.72 |
| 1012 | R.ATHYHLSSQVQEMAGK.I | | 596.290 | 3 | 1786.855 | 1786.854 | 0 | 0.3 | 1208 | 667.3 | 667.3 | 667.3 | 11.72 |
| 1012 | R.ATHYHLSSQVQEMAGK.I | | 596.290 | 3 | 1786.855 | 1786.854 | 0 | 0.4 | 1208 | 666.6 | 666.6 | 666.6 | 11.72 |
| 1012 | R.ATHYHLSSQVQEMAGK.I | | 596.290 | 3 | 1786.854 | 1786.854 | 0 | 0.0 | 1208 | 565.3 | 565.3 | 565.3 | 9.72 |
| 1012 | R.ATHYHLSSQVQEMAGK.I | | 893.931 | 2 | 1786.855 | 1786.854 | 0 | 0.3 | 1208 | 639.1 | 639.1 | 639.1 | 9.30 |
| 811 | R.ATHYHLSSQVQEMAGKIDLLR.D | | 480.453 | 5 | 2398.237 | 2397.234 | 1 | 0.3 | 1208 | 560.4 | 560.4 | 560.4 | 9.12 |
| 1562 | R.ATHYHLSSQVQEM[+15.995]AGK.I | M[+16] | 601.621 | 3 | 1802.849 | 1802.849 | 0 | −0.1 | 1208 | 552.7 | 552.7 | 552.7 | 8.98 |
| 1562 | R.ATHYHLSSQVQEM[+15.995]AGK.I | M[+16] | 601.621 | 3 | 1802.850 | 1802.849 | 0 | 0.3 | 1208 | 493.6 | 493.6 | 493.6 | 8.80 |
| 1012 | R.ATHYHLSSQVQEMAGK.I | | 596.290 | 3 | 1786.854 | 1786.854 | 0 | 0.0 | 1208 | 406.2 | 406.2 | 406.2 | 8.42 |
| 1012 | R.ATHYHLSSQVQEMAGK.I | | 596.290 | 3 | 1786.855 | 1786.854 | 0 | 0.7 | 1208 | 518.0 | 518.0 | 518.0 | 8.21 |
| 1562 | R.ATHYHLSSQVQEM[+15.995]AGK.I | M[+16] | 601.621 | 3 | 1802.849 | 1802.849 | 0 | 0.1 | 1208 | 441.9 | 441.9 | 441.9 | 8.05 |
| 1012 | R.ATHYHLSSQVQEMAGK.I | | 447.469 | 4 | 1786.855 | 1786.854 | 0 | 0.4 | 1208 | 414.2 | 414.2 | 414.2 | 7.83 |
| 1012 | R.ATHYHLSSQVQEMAGK.I | | 447.470 | 4 | 1786.856 | 1786.854 | 0 | 1.1 | 1208 | 412.0 | 412.0 | 412.0 | 7.53 |
| 1012 | R.ATHYHLSSQVQEMAGK.I | | 447.469 | 4 | 1786.854 | 1786.854 | 0 | 0.1 | 1208 | 388.0 | 388.0 | 388.0 | 7.42 |
| 1012 | R.ATHYHLSSQVQEMAGK.I | | 447.469 | 4 | 1786.854 | 1786.854 | 0 | 0.1 | 1208 | 373.5 | 373.5 | 373.5 | 7.23 |
| 1012 | R.ATHYHLSSQVQEMAGK.I | | 447.470 | 4 | 1786.859 | 1786.854 | 0 | 2.7 | 1208 | 464.9 | 464.9 | 464.9 | 6.64 |
| 1562 | R.ATHYHLSSQVQEM[+15.995]AGK.I | M[+16] | 451.468 | 4 | 1802.849 | 1802.849 | 0 | −0.1 | 1208 | 373.1 | 359.6 | 359.6 | 6.18 |
| 1012 | R.ATHYHLSSQVQEMAGK.I | | 447.469 | 4 | 1786.854 | 1786.854 | 0 | 0.1 | 1208 | 359.9 | 359.9 | 359.9 | 6.09 |
| 1562 | R.ATHYHLSSQVQEM[+15.995]AGK.I | M[+16] | 451.468 | 4 | 1802.849 | 1802.849 | 0 | −0.2 | 1208 | 356.3 | 324.7 | 324.7 | 6.09 |
| 1562 | R.ATHYHLSSQVQEM[+15.995]AGK.I | M[+16] | 451.468 | 4 | 1802.849 | 1802.849 | 0 | 0.0 | 1208 | 374.8 | 328.4 | 328.4 | 5.99 |
| 1012 | R.ATHYHLSSQVQEMAGK.I | | 447.469 | 4 | 1786.856 | 1786.854 | 0 | 0.8 | 1208 | 340.5 | 340.5 | 340.5 | 5.91 |
| 1562 | R.ATHYHLSSQVQEM[+15.995]AGK.I | M[+16] | 451.468 | 4 | 1802.850 | 1802.849 | 0 | 0.3 | 1208 | 361.8 | 295.9 | 295.9 | 5.79 |
| 1012 | R.ATHYHLSSQVQEMAGK.I | | 447.469 | 4 | 1786.854 | 1786.854 | 0 | 0.1 | 1208 | 333.5 | 333.5 | 333.5 | 5.71 |
| 838 | R.DSHIFQLFWR.E | | 674.844 | 2 | 1348.681 | 1348.680 | 0 | 0.7 | 1229 | 554.0 | 378.9 | 378.9 | 8.39 |
| 838 | R.DSHIFQLFWR.E | | 450.231 | 3 | 1348.680 | 1348.680 | 0 | 0.1 | 1229 | 479.9 | 479.9 | 479.9 | 7.76 |
| 1299 | R.EAAEPLSEPKEDQEAAELLSEPEEESER.H | | 1047.813 | 3 | 3141.424 | 3141.423 | 0 | 0.4 | 1239 | 742.6 | 742.6 | 742.6 | 12.70 |
| 1468 | R.EAAEPLSEPKEDQEAAELLS[+79.966]EPEEESERHILELEEV | S[+80] | 1383.884 | 4 | 5532.513 | 5532.505 | 0 | 1.3 | 1239 | 709.0 | 709.0 | 21.9 | 11.20 |
| | YDYLYQPSYR.K | | | | | | | | | | | | |
| 1469 | R.EAAEPLSEPKEDQEAAELLSEPEEES[+79.966]ERHILELEEV | S[+80] | 1383.883 | 4 | 5532.509 | 5532.505 | 0 | 0.5 | 1239 | 651.6 | 651.6 | 46.7 | 10.20 |
| | YDYLYQPSYR.K | | | | | | | | | | | | |
| 1299 | R.EAAEPLSEPKEDQEAAELLSEPEEESER.H | | 1047.813 | 3 | 3141.424 | 3141.423 | 0 | 0.2 | 1239 | 580.4 | 580.4 | 580.4 | 9.70 |
| 1469 | R.EAAEPLSEPKEDQEAAELLSEPEEES[+79.966]ERHILELEEV | S[+80] | 1107.308 | 5 | 5532.510 | 5532.505 | 0 | 0.9 | 1239 | 636.3 | 636.3 | 32.1 | 9.20 |
| | YDYLYQPSYR.K | | | | | | | | | | | | |
| 1380 | R.EAAEPLSEPKEDQEAAELLSEPEEESERHILELEEVYDYLYQPS | | 1363.889 | 4 | 5452.535 | 5452.539 | 0 | −0.8 | 1239 | 653.6 | 572.1 | 572.1 | 9.01 |
| | YR.K | | | | | | | | | | | | |
| 1380 | R.EAAEPLSEPKEDQEAAELLSEPEEESERHILELEEVYDYLYQPS | | 1091.715 | 5 | 5454.546 | 5452.539 | 2 | 0.1 | 1239 | 602.4 | 549.1 | 549.1 | 8.60 |
| | YR.K | | | | | | | | | | | | |
| 1468 | R.EAAEPLSEPKEDQEAAELLS[+79.966]EPEEESERHILELEEV | S[+80] | 1107.308 | 5 | 5532.512 | 5532.505 | 0 | 1.2 | 1239 | 539.0 | 539.0 | 8.1 | 6.58 |
| | YDYLYQPSYR.K | | | | | | | | | | | | |
| 1380 | R.EAAEPLSEPKEDQEAAELLSEPEEESERHILELEEVYDYLYQPS | | 1091.314 | 5 | 5452.539 | 5452.539 | 0 | 0.0 | 1239 | 517.6 | 517.6 | 517.6 | 6.40 |
| | YR.K | | | | | | | | | | | | |
| 1897 | R.KFIKLHQDLK.S | | 423.927 | 3 | 1269.768 | 1269.768 | 0 | 0 .. | 1285 | 333.5 | 333.5 | 333.5 | 4.02 |
| 1897 | R.KFIKLHQDLK.S | | 423.928 | 3 | 1269.768 | 1269.768 | 0 | 0.3 | 1285 | 324.1 | 324.1 | 324.1 | 4.02 |
| 2956 | K.SGEVTLAEIDVIFKDFVNK.Y | | 708.713 | 3 | 2124.124 | 2124.122 | 0 | 0.6 | 1295 | 696.9 | 696.9 | 696.9 | 11.70 |
| 1873 | R.DWIKDRVEQIK.E | | 477.265 | 3 | 1429.781 | 1429.780 | 0 | 0.6 | 1334 | 357.6 | 357.6 | 357.6 | 5.09 |
| 2161 | K.DRVEQIKEYHHLHQAVHAAK.V | | 482.657 | 5 | 2409.254 | 2409.253 | 0 | 0.3 | 1338 | 436.1 | 436.1 | 436.1 | 6.05 |
| 1892 | R.VEQIKEYHHLHQAVHAAK.V | | 428.431 | 5 | 2138.127 | 2138.125 | 0 | 0.6 | 1340 | 479.1 | 479.1 | 479.1 | 7.22 |
| 1892 | R.VEQIKEYHHLHQAVHAAK.V | | 535.287 | 4 | 2138.126 | 2138.125 | 0 | 0.4 | 1340 | 424.5 | 424.5 | 424.5 | 6.39 |
| 1892 | R.VEQIKEYHHLHQAVHAAK.V | | 428.431 | 5 | 2138.126 | 2138.125 | 0 | 0.2 | 1340 | 396.1 | 396.1 | 396.1 | 5.98 |
| 1892 | R.VEQIKEYHHLHQAVHAAK.V | | 428.431 | 5 | 2138.127 | 2138.125 | 0 | 0.8 | 1340 | 336.5 | 336.5 | 336.5 | 4.66 |
| 1892 | R.VEQIKEYHHLHQAVHAAK.V | | 428.431 | 5 | 2138.127 | 2138.125 | 0 | 0.6 | 1340 | 336.8 | 336.8 | 336.8 | 4.47 |
| 2924 | K.ESLGLNGDFSVLNTLLNFTDNFDDFRR.E | | 1040.508 | 3 | 3119.508 | 3119.507 | 0 0 | 0.4 | 1364 | 644.2 | 644.2 | 644.2 | 10.11 |
| 1077 | R.ETLDQINQELIQAKK.L | | 590.992 | 3 | 1770.961 | 1770.960 | 0 | 0.6 | 1391 | 601.2 | 590.4 | 590.4 | 10.44 |
| 946 | R.ETLDQINQELIQAK.K | | 821.936 | 2 | 1642.865 | 1642.865 | 0 | −0.1 | 1391 | 476.3 | 418.1 | 418.1 | 8.05 |
| 946 | R.ETLDQINQELIQAK.K | | 548.293 | 3 | 1642.865 | 1642.865 | 0 | 0.2 | 1391 | 380.3 | 380.3 | 380.3 | 6.90 |
| 946 | R.ETLDQINQELIQAK.K | | 548.293 | 3 | 1642.864 | 1642.865 | 0 | 0.4 | 1391 | 317.8 | 317.8 | 317.8 | 4.52 |
| 1101 | K.KLLQDISEAR.C | | 586.835 | 2 | 1172.663 | 1172.663 | 0 | 0.1 | 1405 | 609.3 | 485.5 | 485.5 | 9.83 |
| 1101 | K.KLLQDISEAR.C | | 586.835 | 2 | 1172.663 | 1172.663 | 0 | 0.0 | 1405 | 321.7 | 321.7 | 321.7 | 5.71 |
| 998 | K.LLQDISEAR.C | | 522.788 | 2 | 1044.568 | 1044.568 | 0 | 0.0 | 1406 | 524.5 | 304.8 | 304.8 | 6.95 |
| 998 | K.LLQDISEAR.C | | 522.788 | 2 | 1044.568 | 1044.568 | 0 | −0.2 | 1406 | 536.1 | 315.6 | 315.6 | 6.37 |
| 998 | K.LLQDISEAR.C | | 522.788 | 2 | 1044.569 | 1044.568 | 0 | 0.1 | 1406 | 371.2 | 283.9 | 283.9 | 5.79 |
| 998 | K.LLQDISEAR.C | | 522.788 | 2 | 1044.568 | 1044.568 | 0 | −0.2 | 1406 | 386.4 | 253.2 | 253.2 | 4.92 |
| 2286 | R.EALGGINELK.V | | 522.290 | 2 | 1043.573 | 1043.573 | 0 | 0.2 | 1433 | 447.3 | 447.3 | 447.3 | 7.76 |
| 2191 | K.ALDKDQYLPR.K | | 406.887 | 3 | 1218.648 | 1218.648 | 0 | 0.0 | 1498 | 529.7 | 529.7 | 529.7 | 8.12 |
| 1029 | K.ALDKDQYLPRK.L | | 449.586 | 3 | 1346.743 | 1346.743 | 0 | −0.1 | 1498 | 489.3 | 489.3 | 489.3 | 7.30 |
| 2191 | K.ALDKDQYLPR.K | | 609.828 | 2 | 1218.648 | 1218.648 | 0 | 0.4 | 1498 | 420.0 | 420.0 | 420.0 | 7.07 |
| 1029 | K.ALDKDQYLPRK.L | | 449.586 | 3 | 1346.744 | 1346.743 | 0 | 0.7 | 1498 | 381.0 | 381.0 | 381.0 | 6.61 |
| 832 | R.NLEWLKTVNESHGSVER.S | | 500.257 | 4 | 1998.004 | 1998.004 | 0 | 0.0 | 1515 | 474.8 | 474.8 | 474.8 | 8.04 |
| 1766 | R.NLEWLK.T | | 401.727 | 2 | 802.446 | 802.446 | 0 | 0.0 | 1515 | 301.2 | 199.1 | 199.1 | 4.74 |
| 1766 | R.NLEWLK.T | | 401.727 | 2 | 802.446 | 802.446 | 0 | −0.1 | 1515 | 309.8 | 97.7 | 97.7 | 4.11 |
| 2033 | K.TVNESHGSVER.S | | 405.531 | 3 | 1214.577 | 1214.576 | 0 | 0.7 | 1521 | 372.6 | 372.6 | 372.6 | 7.23 |
| 808 | R.SSLTLATAINQR.G | | 637.857 | 2 | 1274.706 | 1274.706 | 0 | 0.0 | 1532 | 685.8 | 685.8 | 685.8 | 11.72 |
| 808 | R.SSLTLATAINQR.G | | 637.857 | 2 | 1274.706 | 1274.706 | 0 | −0.1 | 1532 | 657.0 | 657.0 | 657.0 | 11.72 |
| 808 | R.SSLTLATAINQR.G | | 637.857 | 2 | 1274.707 | 1274.706 | 0 | 0.7 | 1532 | 635.4 | 635.4 | 635.4 | 10.72 |
| 808 | R.SSLTLATAINQR.G | | 637.857 | 2 | 1274.707 | 1274.706 | 0 | 0.6 | 1532 | 577.1 | 577.1 | 577.1 | 9.12 |
| 808 | R.SSLTLATAINQR.G | | 637.857 | 2 | 1274.706 | 1274.706 | 0 | 0.0 | 1532 | 503.1 | 503.1 | 503.1 | 8.21 |
| 808 | R.SSLTLATAINQR.G | | 637.857 | 2 | 1274.707 | 1274.706 | 0 | 0.3 | 1532 | 367.7 | 367.7 | 367.7 | 7.42 |
| 808 | R.SSLTLATAINQR.G | | 425.574 | 3 | 1274.707 | 1274.706 | 0 | 0.2 | 1532 | 412.9 | 412.9 | 412.9 | 7.02 |
| 847 | R.GIYVIQAPKGGQK.I | | 679.893 | 2 | 1358.779 | 1358.779 | 0 | 0.2 | 1544 | 649.8 | 649.8 | 649.8 | 9.86 |
| 813 | R.GIYVIQAPK.G | | 494.795 | 2 | 988.583 | 988.583 | 0 | 0.2 | 1544 | 417.1 | 417.1 | 417.1 | 7.53 |
| 813 | R.GIYVIQAPK.G | | 494.795 | 2 | 988.583 | 988.583 | 0 | −0.1 | 1544 | 433.3 | 433.3 | 433.3 | 7.15 |
| 847 | R.GIYVIQAPKGGQK.I | | 679.893 | 2 | 1358.779 | 1358.779 | 0 | −0.2 | 1544 | 423.7 | 423.7 | 423.7 | 6.68 |
| 813 | R.GIYVIQAPK.G | | 494.795 | 2 | 988.583 | 988.583 | 0 | 0.3 | 1544 | 347.9 | 278.7 | 278.7 | 5.61 |
| 1331 | K.ISPDTVLHLILPESPGSHEESR.E | | 604.064 | 4 | 2413.236 | 2413.236 | 0 | 0.0 | 1557 | 633.2 | 633.2 | 633.2 | 10.98 |
| 937 | K.ISPDTVLHLILPESPGSHEESREYSLEEVKELLNK.L | | 798.417 | 5 | 3988.054 | 3988.055 | 0 | −0.1 | 1557 | 398.2 | 398.2 | 398.2 | 6.63 |
| 937 | K.ISPDTVLHLILPESPGSHEESREYSLEEVKELLNK.L | | 798.417 | 5 | 3988.055 | 3988.055 | 0 | 0.0 | 1557 | 373.4 | 373.4 | 373.4 | 6.63 |
| 937 | K.ISPDTVLHLILPESPGSHEESREYSLEEVKELLNK.L | | 665.516 | 6 | 3988.058 | 3988.055 | 0 | 0.6 | 1557 | 363.5 | 363.5 | 363.5 | 6.16 |
| 937 | K.ISPDTVLHLILPESPGSHEESREYSLEEVKELLNK.L | | 798.417 | 5 | 3988.057 | 3988.055 | 0 | 0.4 | 1557 | 400.9 | 400.9 | 400.9 | 6.08 |
| 937 | K.ISPDTVLHLILPESPGSHEESREYSLEEVKELLNK.L | | 997.770 | 4 | 3988.057 | 3988.055 | 0 | 0.4 | 1557 | 511.1 | 511.1 | 511.1 | 5.43 |
| 937 | K.ISPDTVLHLILPESPGSHEESREYSLEEVKELLNK.L | | 997.770 | 4 | 3988.057 | 3988.055 | 0 | 0.4 | 1557 | 432.4 | 432.4 | 432.4 | 5.04 |
| 937 | K.ISPDTVLHLILPESPGSHEESREYSLEEVKELLNK.L | | 665.683 | 6 | 3989.059 | 3988.055 | 1 | 0.1 | 1557 | 308.6 | 308.6 | 259.7 | 4.55 |
| 937 | K.ISPDTVLHLILPESPGSHEESREYSLEEVKELLNK.L | | 570.586 | 7 | 3988.058 | 3988.055 | 0 | 0.8 | 1557 | 305.5 | 305.5 | 305.5 | 4.03 |
| 982 | R.EYSLEEVKELLNK.L | | 797.422 | 2 | 1593.837 | 1593.837 | 0 | 0.1 | 1579 | 580.8 | 389.1 | 389.1 | 9.44 |
| 982 | R.EYSLEEVKELLNK.L | | 531.950 | 3 | 1593.837 | 1593.837 | 0 | −0.3 | 1579 | 468.7 | 468.7 | 468.7 | 7.19 |
| 1718 | R.NNTEVERFSEVFC[+57.021]SVQR.L | C[+57] | 700.998 | 3 | 2100.979 | 2100.977 | 0 | 0.9 | 1602 | 513.3 | 513.3 | 513.3 | 8.20 |
| 928 | R.LSQAFIDLHSAGNMLFR.T | | 640.665 | 3 | 1919.980 | 1919.980 | 0 | 0.2 | 1619 | 496.8 | 496.8 | 496.8 | 9.07 |
| 1595 | R.LSQAFIDLHSAGNM[+15.995]LFR.T | M[+16] | 645.997 | 3 | 1935.975 | 1935.975 | 0 | 0.4 | 1619 | 416.8 | 416.8 | 416.8 | 7.80 |
| 899 | R.KQPPSDAALTMLSFIK.S | | 873.976 | 2 | 1746.946 | 1746.946 | 0 | 0.2 | 1718 | 443.1 | 443.1 | 443.1 | 8.06 |
| 899 | R.KQPPSDAALTMLSFIK.S | | 582.987 | 3 | 1746.946 | 1746.946 | 0 | −0.1 | 1718 | 401.5 | 401.5 | 401.5 | 7.53 |
| 1899 | R.KQPPSDAALTMLSFIK.S | | 582.987 | 3 | 1746.946 | 1746.946 | 0 | 0.2 | 1718 | 386.7 | 386.7 | 386.7 | 7.42 |
| 899 | R.KQPPSDAALTMLSFIK.S | | 873.976 | 2 | 1746.946 | 1746.946 | 0 | −0.2 | 1718 | 327.2 | 327.2 | 327.2 | 5.80 |
| 809 | K.QPPSDAALTMLSFIK.S | | 809.929 | 2 | 1618.851 | 1618.851 | 0 | −0.1 | 1719 | 497.0 | 497.0 | 497.0 | 8.80 |
| 809 | K.QPPSDAALTMLSFIK.S | | 809.929 | 2 | 1618.851 | 1618.851 | 0 | 0.0 | 1719 | 459.3 | 459.3 | 459.3 | 8.65 |
| 809 | K.QPPSDAALTMLSFIK.S | | 540.289 | 3 | 1618.851 | 1618.851 | 0 | −0.1 | 1719 | 452.5 | 452.5 | 452.5 | 8.13 |
| 809 | K.QPPSDAALTMLSFIK.S | | 809.930 | 2 | 1618.852 | 1618.851 | 0 | 0.6 | 1719 | 452.6 | 388.5 | 388.5 | 7.76 |
| 809 | K.QPPSDAALTMLSFIK.S | | 540.289 | 3 | 1618.851 | 1618.851 | 0 | 0.2 | 1719 | 440.7 | 440.7 | 440.7 | 7.53 |
| 809 | K.QPPSDAALTMLSFIK.S | | 809.929 | 2 | 1618.852 | 1618.851 | 0 | 0.4 | 1719 | 399.9 | 399.9 | 399.9 | 7.42 |
| 809 | K.QPPSDAALTMLSFIK.S | | 540.288 | 3 | 1618.851 | 1618.851 | 0 | −0.2 | 1719 | 419.8 | 419.8 | 419.8 | 6.43 |
| 809 | K.QPPSDAALTMLSFIK.S | | 540.288 | 3 | 1618.851 | 1618.851 | 0 | −0.2 | 1719 | 397.3 | 397.3 | 397.3 | 6.31 |
| 809 | K.QPPSDAALTMLSFIK.S | | 809.929 | 2 | 1618.851 | 1618.851 | 0 | 0.3 | 1719 | 329.4 | 329.4 | 329.4 | 6.09 |
| 809 | K.QPPSDAALTMLSFIK.S | | 809.929 | 2 | 1618.851 | 1618.851 | 0 | −0.2 | 1719 | 323.4 | 323.4 | 323.4 | 5.51 |
| 1312 | R.RVMEELPLMLLSEFSLVDKLR.I | | 840.131 | 3 | 2518.378 | 2518.377 | 0 | 0.2 | 1759 | 679.0 | 679.0 | 679.0 | 11.70 |
| 1312 | R.RVMEELPLMLLSEFSLVDKLR.I | | 630.350 | 4 | 2518.378 | 2518.377 | 0 | 0.2 | 1759 | 649.5 | 649.5 | 649.5 | 10.70 |
| 1633 | R.RVMEELPLM[+15.995]LLSEFSLVDKLR.I | M[+16] | 845.462 | 3 | 2534.373 | 2534.372 | 0 | 0.3 | 1759 | 613.2 | 613.2 | 257.5 | 10.70 |
| 1633 | R.RVMEELPLM[+15.995]LLSEFSLVDKLR.I | M[+16] | 634.349 | 4 | 2534.374 | 2534.372 | 0 | 0.7 | 1759 | 561.6 | 561.6 | 313.5 | 9.70 |
| 1003 | R.RVMEELPLMLLSEFSLVDK.L | | 750.403 | 3 | 2249.193 | 2249.192 | 0 | 0.5 | 1759 | 496.0 | 496.0 | 496.0 | 8.47 |
| 1593 | R.RVMEELPLM[+15.995]LLSEFSLVDK.L | M[+16] | 755.734 | 3 | 2265.187 | 2265.187 | 0 | 0.0 | 1759 | 431.0 | 431.0 | 317.6 | 7.61 |
| 1626 | R.VM[+15.995]EELPLMLLSEFSLVDKLR.I | M[+16] | 793.429 | 3 | 2378.272 | 2378.271 | 0 | 0.5 | 1760 | 757.8 | 757.8 | 423.1 | 13.70 |
| 862 | R.VMEELPLMLLSEFSLVDKLR.I | | 591.325 | 4 | 2362.277 | 2362.276 | 0 | 0.3 | 1760 | 761.7 | 761.7 | 761.7 | 13.19 |
| 862 | R.VMEELPLMLLSEFSLVDKLR.I | | 788.098 | 3 | 2362.278 | 2362.276 | 0 | 1.0 | 1760 | 739.2 | 739.2 | 739.2 | 12.70 |
| 862 | R.VMEELPLMLLSEFSLVDKLR.I | | 788.097 | 3 | 2362.277 | 2362.276 | 0 | 0.6 | 1760 | 725.9 | 725.9 | 725.9 | 12.70 |
| 1606 | R.VMEELPLM[+15.995]LLSEFSLVDKLR.I | M[+16] | 793.429 | 3 | 2378.273 | 2378.271 | 0 | 1.0 | 1760 | 660.1 | 660.1 | 371.0 | 11.70 |
| 1606 | R.VMEELPLM[+15.995]LLSEFSLVDKLR.I | M[+16] | 595.323 | 4 | 2378.272 | 2378.271 | 0 | 0.4 | 1760 | 674.7 | 674.7 | 368.7 | 11.19 |
| 862 | R.VMEELPLMLLSEFSLVDKLR.I | | 1181.644 | 2 | 2362.280 | 2362.276 | 0 | 1.5 | 1760 | 630.3 | 630.3 | 630.3 | 10.70 |
| 1626 | R.VM[+15.995]EELPLMLLSEFSLVDKLR.I | M[+16] | 793.428 | 3 | 2378.270 | 2378.271 | 0 | −0.2 | 1760 | 645.8 | 645.8 | 99.7 | 10.12 |
| 1606 | R.VMEELPLM[+15.995]LLSEFSLVDKLR.I | M[+16] | 793.429 | 3 | 2378.272 | 2378.271 | 0 | 0.6 | 1760 | 574.5 | 574.5 | 399.5 | 9.70 |
| 1614 | R.VMEELPLM[+15.995]LLSEFSLVDK.L | M[+16] | 703.701 | 3 | 2109.089 | 2109.086 | 0 | 1.4 | 1760 | 577.8 | 577.8 | 402.7 | 9.46 |
| 1082 | R.VMEELPLMLLSEFSLVDK.L | | 1047.051 | 2 | 2093.094 | 2093.091 | 0 | 1.4 | 1760 | 526.7 | 526.7 | 526.7 | 9.25 |
| 1614 | R.VMEELPLM[+15.995]LLSEFSLVDK.L | M[+16] | 1055.048 | 2 | 2109.088 | 2109.086 | 0 | 1.1 | 1760 | 495.7 | 495.7 | 296.6 | 9.07 |
| 1626 | R.VM[+15.995]EELPLMLLSEFSLVDKLR.I | M[+16] | 1189.639 | 2 | 2378.272 | 2378.271 | 0 | 0.3 | 1760 | 530.0 | 530.0 | 276.3 | 8.97 |
| 1606 | R.VMEELPLM[+15.995]LLSEFSLVDKLR.I | M[+16] | 1189.639 | 2 | 2378.271 | 2378.271 | 0 | 0.2 | 1760 | 467.2 | 467.2 | 313.8 | 8.64 |
| 1082 | R.VMEELPLMLLSEFSLVDK.L | | 698.369 | 3 | 2093.093 | 2093.091 | 0 | 0.9 | 1760 | 518.4 | 518.4 | 518.4 | 8.55 |
| 1606 | R.VMEELPLM[+15.995]LLSEFSLVDKLR.I | M[+16] | 793.429 | 3 | 2378.273 | 2378.271 | 0 | 1.0 | 1760 | 419.9 | 419.9 | 331.8 | 8.41 |
| 862 | R.VMEELPLMLLSEFSLVDKLR.I | | 788.097 | 3 | 2362.278 | 2362.276 | 0 | 0.7 | 1760 | 404.7 | 404.7 | 404.7 | 7.81 |
| 1529 | R.VM[+15.995]EELPLMLLSEFSLVDK.L | M[+16] | 703.701 | 3 | 2109.087 | 2109.086 | 0 | 0.6 | 1760 | 454.0 | 454.0 | 233.1 | 7.79 |
| 862 | R.VMEELPLMLLSEFSLVDKLR.I | | 788.097 | 3 | 2362.278 | 2362.276 | 0 | 0.7 | 1760 | 447.1 | 447.1 | 447.1 | 7.56 |
| 1529 | R.VM[+15.995]EELPLMLLSEFSLVDK.L | M[+16] | 703.701 | 3 | 2109.087 | 2109.086 | 0 | 0.7 | 1760 | 375.9 | 375.9 | 196.2 | 7.16 |
| 862 | R.VMEELPLMLLSEFSLVDKLR.I | | 788.098 | 3 | 2362.279 | 2362.276 | 0 | 1.1 | 1760 | 347.2 | 347.2 | 347.2 | 6.08 |
| 834 | R.IIMEQSMR.C | | 504.254 | 2 | 1007.501 | 1007.501 | 0 | 0.0 | 1780 | 504.7 | 504.7 | 504.7 | 7.73 |
| 834 | R.IIMEQSMR.C | | 504.254 | 2 | 1007.501 | 1007.501 | 0 | −0.2 | 1780 | 434.4 | 434.4 | 434.4 | 7.35 |
| 834 | R.IIMEQSMR.C | | 504.254 | 2 | 1007.501 | 1007.501 | 0 | 0.1 | 1780 | 365.5 | 365.5 | 365.5 | 7.23 |
| 834 | R.IIMEQSMR.C | | 504.254 | 2 | 1007.501 | 1007.501 | 0 | −0.1 | 1780 | 349.9 | 349.9 | 349.9 | 5.71 |
| 834 | R.IIMEQSMR.C | | 504.254 | 2 | 1007.502 | 1007.501 | 0 | 0.3 | 1780 | 327.2 | 327.2 | 327.2 | 5.71 |
| 1531 | R.IIM[+15.995]EQSMR.C | M[+16] | 512.252 | 2 | 1023.496 | 1023.496 | 0 | 0.1 | 1780 | 306.8 | 306.8 | 29.3 | 5.14 |
| 1531 | R.IIM[+15.995]EQSMR.C | M[+16] | 512.252 | 2 | 1023.496 | 1023.496 | 0 | −0.5 | 1780 | 340.7 | 340.7 | 19.1 | 4.83 |
| 851 | K.VFVTPQAPLEAIQAYLAGHYRVPK.Q | | 667.871 | 4 | 2668.463 | 2668.461 | 0 | 0.6 | 1948 | 824.7 | 824.7 | 824.7 | 14.70 |
| 851 | K.VFVTPQAPLEAIQAYLAGHYRVPK.Q | | 667.871 | 4 | 2668.462 | 2668.461 | 0 | 0.3 | 1948 | 771.8 | 771.8 | 771.8 | 13.70 |
| 851 | K.VFVTPQAPLEAIQAYLAGHYRVPK.Q | | 667.871 | 4 | 2668.461 | 2668.461 | 0 | 0.1 | 1948 | 765.5 | 765.5 | 765.5 | 13.70 |
| 1411 | K.VFVTPQAPLEAIQAYLAGHYR.V | | 586.817 | 4 | 2344.246 | 2344.245 | 0 | 0.5 | 1948 | 724.4 | 724.4 | 724.4 | 12.46 |
| 851 | K.VFVTPQAPLEAIQAYLAGHYRVPK.Q | | 534.498 | 5 | 2668.461 | 2668.461 | 0 | 0.1 | 1948 | 694.1 | 694.1 | 694.1 | 11.19 |
| 814 | K.QTLSAAAVFNDR.L | | 646.833 | 2 | 1292.660 | 1292.659 | 0 | 0.1 | 1972 | 624.7 | 514.2 | 514.2 | 10.72 |
| 814 | K.QTLSAAAVFNDR.L | | 646.833 | 2 | 1292.659 | 1292.659 | 0 | −0.3 | 1972 | 579.6 | 481.6 | 481.6 | 9.13 |
| 814 | K.QTLSAAAVFNDR.L | | 646.834 | 2 | 1292.660 | 1292.659 | 0 | 0.4 | 1972 | 471.1 | 451.2 | 451.2 | 8.05 |
| 814 | K.QTLSAAAVFNDR.L | | 646.834 | 2 | 1292.660 | 1292.659 | 0 | 0.4 | 1972 | 469.9 | 419.2 | 419.2 | 8.05 |
| 814 | K.QTLSAAAVFNDR.L | | 431.558 | 3 | 1292.660 | 1292.659 | 0 | 0.1 | 1972 | 399.9 | 399.9 | 399.9 | 6.90 |
| 814 | K.QTLSAAAVFNDR.L | | 431.558 | 3 | 1292.659 | 1292.659 | 0 | −0.4 | 1972 | 399.1 | 399.1 | 399.1 | 6.13 |
| 1480 | K.QTLSAAAVFN[+0.984]DR.L | N[+1] | 647.321 | 2 | 1293.634 | 1293.643 | 0 | −7.5 | 1972 | 319.8 | 319.8 | 319.8 | 3.81 |
| 910 | K.MQLNVKNVPLKTIR.L | | 414.251 | 4 | 1653.982 | 1653.983 | 0 | −0.6 | 2011 | 358.4 | 358.4 | 358.4 | 4.89 |
| 1244 | R.LIDPQVDESRVLGALLPFLDAQYQK.V | | 943.512 | 3 | 2828.522 | 2828.519 | 0 | 1.0 | 2025 | 497.7 | 497.7 | 497.7 | 7.91 |
| 1244 | R.LIDPQVDESRVLGALLPFLDAQYQK.V | | 707.886 | 4 | 2828.521 | 2828.519 | 0 | 0.5 | 2025 | 413.0 | 413.0 | 413.0 | 7.30 |
| 1009 | R.LIDPQVDESR.V | | 586.301 | 2 | 1171.595 | 1171.595 | 0 | 0.1 | 2025 | 476.6 | 306.3 | 306.3 | 6.32 |
| 1009 | R.LIDPQVDESR.V | | 586.301 | 2 | 1171.595 | 1171.595 | 0 | −0.6 | 2025 | 421.0 | 231.7 | 231.7 | 5.46 |
| 871 | R.VLGALLPFLDAQYQK.V | | 559.319 | 3 | 1675.942 | 1675.942 | 0 | 0.3 | 2035 | 535.9 | 535.9 | 535.9 | 8.47 |
| 843 | R.TRVPQFSFLDIFPK.V | | 565.647 | 3 | 1694.927 | 1694.927 | 0 | 0.5 | 2116 | 509.6 | 509.6 | 509.6 | 7.64 |
| 843 | R.TRVPQFSFLDIFPK.V | | 565.647 | 3 | 1694.926 | 1694.927 | 0 | −0.4 | 2116 | 422.0 | 422.0 | 422.0 | 7.57 |
| 843 | R.TRVPQFSFLDIFPK.V | | 565.647 | 3 | 1694.927 | 1694.927 | 0 | 0.1 | 2116 | 391.3 | 391.3 | 391.3 | 7.43 |
| 843 | R.TRVPQFSFLDIFPK.V | | 565.647 | 3 | 1694.927 | 1694.927 | 0 | 0.1 | 2116 | 416.4 | 416.4 | 416.4 | 7.26 |
| 843 | R.TRVPQFSFLDIFPK.V | | 565.647 | 3 | 1694.927 | 1694.927 | 0 | 0.3 | 2116 | 385.9 | 385.9 | 385.9 | 7.14 |
| 843 | R.TRVPQFSFLDIFPK.V | | 847.966 | 2 | 1694.926 | 1694.927 | 0 | −0.6 | 2116 | 423.8 | 423.8 | 423.8 | 6.68 |
| 843 | R.TRVPQFSFLDIFPK.V | | 565.647 | 3 | 1694.927 | 1694.927 | 0 | 0.5 | 2116 | 359.5 | 359.5 | 359.5 | 6.11 |
| 843 | R.TRVPQFSFLDIFPK.V | | 565.647 | 3 | 1694.928 | 1694.927 | 0 | 0.6 | 2116 | 331.2 | 331.2 | 331.2 | 5.82 |
| 843 | R.TRVPQFSFLDIFPK.V | | 565.647 | 3 | 1694.928 | 1694.927 | 0 | 0.7 | 2116 | 318.4 | 318.4 | 318.4 | 5.54 |
| 830 | R.VPQFSFLDIFPK.V | | 719.393 | 2 | 1437.779 | 1437.778 | 0 | 0.7 | 2118 | 578.8 | 578.8 | 578.8 | 9.72 |
| 830 | R.VPQFSFLDIFPK.V | | 479.931 | 3 | 1437.777 | 1437.778 | 0 | −0.3 | 2118 | 401.9 | 401.9 | 401.9 | 6.72 |
| 830 | R.VPQFSFLDIFPK.V | | 719.393 | 2 | 1437.779 | 1437.778 | 0 | 0.7 | 2118 | 320.1 | 320.1 | 320.1 | 5.91 |
| 1691 | K.VTC[+57.021]RPPKEVIDMELSALR.S | C[+57] | 529.283 | 4 | 2114.109 | 2114.110 | 0 | −0.5 | 2130 | 354.3 | 354.3 | 354.3 | 5.31 |
| 1691 | K.VTC[+57.021]RPPKEVIDMELSALR.S | C[+57] | 529.533 | 4 | 2115.112 | 2114.110 | 1 | −0.6 | 2130 | 321.9 | 321.9 | 321.9 | 5.31 |
| 2476 | K.EVIDMELSALR.S | | 638.334 | 2 | 1275.661 | 1275.661 | 0 | 0.0 | 2137 | 586.0 | 455.0 | 455.0 | 9.12 |
| 2476 | K.EVIDMELSALR.S | | 638.334 | 2 | 1275.661 | 1275.661 | 0 | −0.3 | 2137 | 483.7 | 448.4 | 448.4 | 7.33 |
| 1740 | R.SDTEPGMDLWEFC[+57.021]SETFQRPYQYLR.R | C[+57] | 1052.468 | 3 | 3155.391 | 3155.387 | 0 | 1.1 | 2148 | 758.2 | 758.2 | 758.2 | 13.98 |
| 1740 | R.SDTEPGMDLWEFC[+57.021]SETFQRPYQYLR.R | C[+57 | 1052.468 | 3 | 3155.390 | 3155.387 | 0 | 0.8 | 2148 | 673.6 | 673.6 | 673.6 | 11.98 |
| 1773 | R.FLNYQLR.D | | 477.264 | 2 | 953.520 | 953.520 | 0 | 0.0 | 2221 | 426.0 | 426.0 | 426.0 | 7.15 |
| 1773 | R.FLNYQLR.D | | 477.264 | 2 | 953.520 | 953.520 | 0 | 0.0 | 2221 | 423.2 | 423.2 | 423.2 | 6.86 |
| 1773 | R.FLNYQLR.D | | 477.264 | 2 | 953.520 | 953.520 | 0 | 0.3 | 2221 | 371.2 | 371.2 | 371.2 | 6.45 |
| 1773 | R.FLNYQLR.D | | 477.264 | 2 | 953.520 | 953.520 | 0 | −0.2 | 2221 | 345.8 | 293.0 | 293.0 | 5.51 |
| 1773 | R.FLNYQLR.D | | 477.264 | 2 | 953.520 | 953.520 | 0 | 0.0 | 2221 | 354.4 | 354.4 | 354.4 | 5.42 |
| 1773 | R.FLNYQLR.D | | 477.264 | 2 | 953.520 | 953.520 | 0 | 0.0 | 2221 | 333.2 | 333.2 | 333.2 | 5.42 |
| 1773 | R.FLNYQLR.D | | 477.264 | 2 | 953.520 | 953.520 | 0 | −0.1 | 2221 | 352.2 | 270.0 | 270.0 | 15.12 |
| 833 | R.DFATPSLHTSDQSPGK.H | | 563.269 | 3 | 1687.792 | 1687.792 | 0 | 0.3 | 2261 | 519.2 | 381.1 | 381.1 | 7.62 |
| 833 | R.DFATPSLHTSDQSPGK.H | | 563.269 | 3 | 1687.792 | 1687.792 | 0 | 0.2 | 2261 | 386.4 | 386.4 | 386.4 | 6.64 |
| 1466 | R.DFATPS[+79.966]LHTSDQSPGKHMVTMDGVREEDLAPFSLR.K | S[+80] | 791.167 | 5 | 3951.806 | 3951.804 | 0 | 0.4 | 2261 | 346.8 | 346.8 | 36.0 | 4.64 |
| 1088 | K.HMVTMDGVREEDLAPFSLR.K | | 735.026 | 3 | 2203.065 | 2203.063 | 0 | 0.5 | 2277 | 515.6 | 515.6 | 515.6 | 8.20 |
| 1883 | K.HMVTMDGVREEDLAPFSLRK.R | | 583.545 | 4 | 2331.157 | 2331.158 | 0 | 0.7 | 2277 | 442.3 | 442.3 | 442.3 | 7.70 |
| 1088 | K.HMVTMDGVREEDLAPFSLR.K | | 735.361 | 3 | 2204.068 | 2203.063 | 1 | 0.5 | 2277 | 390.0 | 390.0 | 390.0 | 7.40 |
| 2226 | K.HMVTMDGVR.E | | 523.250 | 2 | 1045.492 | 1045.492 | 0 | 0.2 | 2277 | 437.9 | 437.9 | 437.9 | 7.35 |
| 1088 | K.HMVTMDGVREEDLAPFSLR.K | | 735.026 | 3 | 2203.063 | 2203.063 | 0 | 0.0 | 2277 | 305.3 | 305.3 | 305.3 | 5.61 |
| 1883 | K.HMVTMDGVREEDLAPFSLRK.R | | 467.038 | 5 | 2331.158 | 2331.158 | 0 | 0.0 | 2277 | 314.0 | 314.0 | 314.0 | 5.26 |
| 1883 | K.HMVTMDGVREEDLAPFSLRK.R | | 778.059 | 3 | 2332.161 | 2331.158 | 1 | −0.3 | 2277 | 364.6 | 364.6 | 364.6 | 5.05 |
| 1537 | K.HMVTM[+15.995]DGVREEDLAPFSLRK.R | M[+16] | 587.794 | 4 | 2348.153 | 2347.153 | 1 | 1.5 | 2277 | 358.0 | 358.0 | 126.6 | 4.96 |
| 1883 | K.HMVTMDGVREEDLAPFSLRK.R | | 777.724 | 3 | 2331.158 | 2331.158 | 0 | −0.2 | 2277 | 316.7 | 316.7 | 316.7 | 3.26 |
| 1121 | R.EEDLAPFSLRK.R | | 435.566 | 3 | 1304.684 | 1304.685 | 0 | −0.2 | 2286 | 466.7 | 466.7 | 466.7 | 7.78 |
| 1121 | R.EEDLAPFSLRK.R | | 652.846 | 2 | 1304.685 | 1304.685 | 0 | 0.4 | 2286 | 519.9 | 519.9 | 519.9 | 7.64 |
| 1121 | R.EEDLAPFSLRK.R | | 435.901 | 3 | 1305.688 | 1304.685 | 1 | −0.2 | 2286 | 513.0 | 513.0 | 513.0 | 6.86 |
| 930 | R.EEDLAPFSLR.K | | 588.798 | 2 | 1176.590 | 1176.590 | 0 | 0.0 | 2286 | 504.6 | 284.8 | 284.8 | 6.77 |
| 930 | R.EEDLAPFSLR.K | | 588.798 | 2 | 1176.589 | 1176.590 | 0 | −0.2 | 2286 | 467.7 | 337.0 | 337.0 | 6.23 |
| 1885 | R.KRWESEPHPYVFFNDDHTTMTFIGFHLQPNINGSVDAISHLTGK.V | | 727.357 | 7 | 5085.455 | 5083.458 | 2 | 2.1 | 2296 | 382.4 | 382.4 | 54.8 | 4.95 |
| 1885 | R.KRWESEPHPYVFFNDDHTTMTFIGFHLQPNINGSVDAISHLTGK.V | | 727.216 | 7 | 5084.470 | 5083.458 | 1 | 1.6 | 2296 | 319.3 | 319.3 | 14.3 | 3.96 |
| 1885 | R.KRWESEPHPYVFFNDDHTTMTFIGFHLQPNINGSVDAISHLTGK.V | | 727.069 | 7 | 5083.442 | 5083.458 | 0 | −3.2 | 2296 | 312.5 | 312.5 | 312.5 | 2.55 |
| 1186 | K.RWESEPHPYVFFNDDHTTMTFIGFHLQPNINGSVDAISHLTGK.V | | 826.900 | 6 | 4956.361 | 4955.364 | 1 | −1.2 | 2297 | 629.6 | 607.6 | 47.4 | 8.64 |
| 840 | R.WESEPHPYVFFNDDHTTMTFIGFHLQPNINGSVDAISHLTGK.V | | 960.859 | 5 | 4800.265 | 4799.262 | 1 | −0.2 | 2298 | 928.3 | 928.3 | 174.3 | 15.95 |
| 840 | R.WESEPHPYVFFNDDHTTMTFIGFHLQPNINGSVDAISHLTGK.V | | 960.660 | 5 | 4799.270 | 4799.262 | 0 | 1.6 | 2298 | 746.1 | 746.1 | 746.1 | 11.82 |
| 840 | R.WESEPHPYVFFNDDHTTMTFIGFHLQPNINGSVDAISHLTGK.V | | 800.717 | 6 | 4799.268 | 4799.262 | 0 | 1.1 | 2298 | 599.2 | 599.2 | 599.2 | 8.82 |
| 840 | R.WESEPHPYVFFNDDHTTMTFIGFHLQPNINGSVDAISHLTGK.V | | 800.714 | 6 | 4799.250 | 4799.262 | 0 | 2.7 | 2298 | 566.5 | 566.5 | 566.5 | 7.34 |
| 1513 | R.WESEPHPYVFFNDDHTTMTFIGFHLQPNIN[+0.984]GSVDAIS | N[+1] | 800.881 | 6 | 4800.247 | 4800.246 | 0 | 0.2 | 2298 | 550.2 | 550.2 | 64.6 | 7.01 |
| | HLTGK.V | | | | | | | | | | | | |
| 840 | R.WESEPHPYVFFNDDHTTMTFIGFHLQPNINGSVDAISHLTGK.V | | 800.717 | 6 | 4799.262 | 4799.262 | 0 | 0.0 | 2298 | 311.4 | 311.4 | 311.4 | 4.24 |
| 1068 | R.DLYQGLLLQRVPFNVDFDKLPR.H | | 882.819 | 3 | 2646.442 | 2646.440 | 0 | 0.8 | 2349 | 850.6 | 850.6 | 850.6 | 15.35 |
| 1068 | R.DLYQGLLLQRVPFNVDFDKLPR.H | | 662.366 | 4 | 2646.441 | 2646.440 | 0 | 0.4 | 2349 | 606.2 | 606.2 | 606.2 | 10.36 |
| 1068 | R.DLYQGLLLQRVPFNVDFDKLPR.H | | 662.366 | 4 | 2646.441 | 2646.440 | 0 | 0.3 | 2349 | 568.8 | 568.8 | 568.8 | 9.36 |
| 984 | R.DLYQGLLLQR.V | | 609.846 | 2 | 1218.684 | 1218.684 | 0 | 0.2 | 2349 | 560.3 | 560.3 | 560.3 | 9.12 |
| 1068 | R.DLYQGLLLQRVPFNVDFDKLPR.H | | 530.094 | 5 | 2646.441 | 2646.440 | 0 | 0.4 | 2349 | 541.7 | 541.7 | 541.7 | 8.11 |
| 1068 | R.DLYQGLLLQRVPFNVDFDKLPR.H | | 882.819 | 3 | 2646.442 | 2646.440 | 0 | 0.6 | 2349 | 541.5 | 541.5 | 541.5 | 8.03 |
| 984 | R.DLYQGLLLQR.V | | 406.900 | 3 | 1218.684 | 1218.684 | 0 | 0.0 | 2349 | 534.5 | 534.5 | 534.5 | 7.87 |
| 984 | R.DLYQGLLLQR.V | | 609.846 | 2 | 1218.684 | 1218.684 | 0 | 0.2 | 2349 | 398.5 | 398.5 | 398.5 | 7.23 |
| 1495 | R.DLYQGLLLQRVPFN[+0.984]VDFDKLPR.H | N[+1] | 883.152 | 3 | 2647.441 | 2647.424 | 0 | 6.4 | 2349 | 433.1 | 433.1 | 223.2 | 5.24 |
| 841 | R.VPFNVDFDKLPR.H | | 482.929 | 3 | 1446.774 | 1446.774 | 0 | −0.1 | 2359 | 605.0 | 605.0 | 605.0 | 10.44 |
| 841 | R.VPFNVDFDKLPR.H | | 482.929 | 3 | 1446.774 | 1446.774 | 0 | −0.2 | 2359 | 579.3 | 579.3 | 579.3 | 9.44 |
| 841 | R.VPFNVDFDKLPR.H | | 723.891 | 2 | 1446.775 | 1446.774 | 0 | 0.3 | 2359 | 494.6 | 494.6 | 494.6 | 7.94 |
| 841 | R.VPFNVDFDKLPR.H | | 723.892 | 2 | 1446.776 | 1446.774 | 0 | 1.4 | 2359 | 459.9 | 459.9 | 459.9 | 7.78 |
| 841 | R.VPFNVDFDKLPR.H | | 482.929 | 3 | 1446.774 | 1446.774 | 0 | −0.2 | 2359 | 430.6 | 430.6 | 430.6 | 7.55 |
| 841 | R.VPFNVDFDKLPR.H | | 482.930 | 3 | 1446.774 | 1446.774 | 0 | 0.1 | 2359 | 404.8 | 404.8 | 404.8 | 7.26 |
| 841 | R.VPFNVDFDKLPR.H | | 723.891 | 2 | 1446.774 | 1446.774 | 0 | −0.1 | 2359 | 391.4 | 391.4 | 391.4 | 7.14 |
| 2022 | R.VPFNVDFDK.L | | 540.772 | 2 | 1080.536 | 1080.536 | 0 | −0.1 | 2359 | 374.7 | 374.7 | 374.7 | 6.74 |
| 841 | R.VPFNVDFDKLPR.H | | 482.929 | 3 | 1446.774 | 1446.774 | 0 | 0.3 | 2359 | 367.2 | 367.2 | 367.2 | 6.37 |
| 1748 | R.LC[+57.021]LTLGIPQATDPDKTYELTTDNMLK.I | C[+57 | 984.496 | 3 | 2951.475 | 2951.474 | 0 | 0.2 | 2377 | 772.4 | 772.4 | 772.4 | 13.70 |
| 1798 | K.ILAIEMR.F | | 423.249 | 2 | 845.491 | 845.491 | 0 | 0.1 | 2403 | 410.4 | 410.4 | 410.4 | 7.35 |
| 1570 | K.ILAIEM[+15.995]R.F | M[+16] | 431.247 | 2 | 861.486 | 861.486 | 0 | −0.1 | 2403 | 372.2 | 372.2 | 372.2 | 6.74 |
| 1798 | K.ILAIEMR.F | | 423.250 | 2 | 845.492 | 845.491 | 0 | 0.3 | 2403 | 416.2 | 273.5 | 273.5 | 5.62 |
| 1798 | K.ILAIEMR.F | | 845.491 | 1 | 845.491 | 845.491 | 0 | −0.7 | 2403 | 386.7 | 239.2 | 239.2 | 4.96 |
| 1798 | K.ILAIEMR.F | | 423.751 | 2 | 846.495 | 845.491 | 1 | 0.7 | 2403 | 306.2 | 306.2 | 306.2 | 3.75 |
| 1781 | K.FLSDLRR.G | | 453.761 | 2 | 906.515 | 906.516 | 0 | −0.2 | 2432 | 401.0 | 401.0 | 401.0 | 6.58 |
| 1781 | K.FLSDLRR.G | | 453.762 | 2 | 906.516 | 906.516 | 0 | 0.2 | 2432 | 346.0 | 218.6 | 218.6 | 4.85 |
| 1781 | K.FLSDLRR.G | | 453.761 | 2 | 906.515 | 906.516 | 0 | −0.2 | 2432 | 300.8 | 300.8 | 300.8 | 4.83 |
| 1781 | K.FLSDLRR.G | | 453.762 | 2 | 906.516 | 906.516 | 0 | 0.2 | 2432 | 332.5 | 257.6 | 257.6 | 4.81 |
| 2259 | R.GGTNADTIKLVK.V | | 608.848 | 2 | 1216.689 | 1216.690 | 0 | −0.2 | 2439 | 632.9 | 476.7 | 476.7 | 10.44 |
| 1506 | R.GGTN[+0.984]ADTIKLVK.V | N[+1] | 406.563 | 3 | 1217.674 | 1217.674 | 0 | −0.1 | 2439 | 525.1 | 427.5 | 427.5 | 8.12 |
| 2259 | R.GGTNADTIKLVK.V | | 406.235 | 3 | 1216.689 | 1216.690 | 0 | 0.3 | 2439 | 496.8 | 496.8 | 496.8 | 7.35 |
| 2259 | R.GGTNADTIKLVK.V | | 609.350 | 2 | 1217.692 | 1216.690 | 1 | −1.0 | 2439 | 424.5 | 424.5 | 424.5 | 4.62 |
| 866 | K.VHGGTTADMIYSR.V | | 704.338 | 2 | 1407.668 | 1407.669 | 0 | −0.1 | 2451 | 717.7 | 717.7 | 717.7 | 12.72 |
| 1538 | K.VHGGTTADM[+15.995]IYSR.V | M[+16] | 712.336 | 2 | 1423.664 | 1423.663 | 0 | 0.3 | 2451 | 571.8 | 571.8 | 571.8 | 9.72 |
| 866 | K.VHGGTTADMIYSR.V | | 469.894 | 3 | 1407.668 | 1407.669 | 0 | −0.3 | 2451 | 476.1 | 476.1 | 476.1 | 8.06 |
| 866 | K.VHGGTTADMIYSR.V | | 704.338 | 2 | 1407.668 | 1407.669 | 0 | −0.5 | 2451 | 454.7 | 454.7 | 454.7 | 8.06 |
| 1538 | K.VHGGTTADM[+15.995]IYSR.V | M[+16] | 475.226 | 3 | 1423.663 | 1423.663 | 0 | −0.1 | 2451 | 407.7 | 407.7 | 407.7 | 7.53 |
| 1538 | K.VHGGTTADM[+15.995]IYSR.V | M[+16] | 475.226 | 3 | 1423.663 | 1423.663 | 0 | −0.4 | 2451 | 459.4 | 459.4 | 459.4 | 7.47 |
| 1538 | K.VHGGTTADM[+15.995]IYSR.V | M[+16] | 475.226 | 3 | 1423.663 | 1423.663 | 0 | 0.0 | 2451 | 393.5 | 393.5 | 393.5 | 7.42 |
| 1538 | K.VHGGTTADM[+15.995]IYSR.V | M[+16] | 475.226 | 3 | 1423.664 | 1423.663 | 0 | 0.0 | 2451 | 401.6 | 401.6 | 401.6 | 7.35 |
| 866 | K.VHGGTTADMIYSR.V | | 469.894 | 3 | 1407.668 | 1407.669 | 0 | −0.2 | 2451 | 421.8 | 421.8 | 421.8 | 7.24 |
| 1538 | K.VHGGTTADM[+15.995]IYSR.V | M[+16] | 475.226 | 3 | 1423.664 | 1423.663 | 0 0 | 0.0 | 2451 | 391.0 | 391.0 | 391.0 | 7.23 |
| 866 | K.VHGGTTADMIYSR.V | | 469.894 | 3 | 1407.668 | 1407.669 | 0 | 0.2 | 2451 | 458.5 | 458.5 | 458.5 | 7.18 |
| 866 | K.VHGGTTADMIYSR.V | | 469.894 | 3 | 1407.668 | 1407.669 | 0 | −0.3 | 2451 | 413.7 | 413.7 | 413.7 | 6.95 |
| 1538 | K.VHGGTTADM[+15.995]IYSR.V | M[+16] | 712.335 | 2 | 1423.663 | 1423.663 | 0 | 0.0 | 2451 | 338.5 | 338.5 | 338.5 | 6.38 |
| 1538 | K.VHGGTTADM[+15.995]IYSR.V | M[+16] | 712.336 | 2 | 1423.664 | 1423.663 | 0 | 0.4 | 2451 | 344.3 | 344.3 | 344.3 | 6.09 |
| 866 | K.VHGGTTADMIYSR.V | | 704.334 | 2 | 1407.660 | 1407.669 | 0 | −6.2 | 2451 | 376.2 | 376.2 | 376.2 | 5.71 |
| 1538 | K.VHGGTTADM[+15.995]IYSR.V | M[+16] | 475.226 | 3 | 1423.664 | 1423.663 | 0 | 0.4 | 2451 | 346.1 | 346.1 | 346.1 | 5.71 |
| 866 | K.VHGGTTADMIYSR.V | | 469.894 | 3 | 1407.667 | 1407.669 | 0 | 0.9 | 2451 | 353.3 | 353.3 | 353.3 | 5.51 |
| 866 | K.VHGGTTADMIYSR.V | | 469.894 | 3 | 1407.668 | 1407.669 | 0 | −0.3 | 2451 | 351.5 | 351.5 | 351.5 | 5.51 |
| 1538 | K.VHGGTTADM[+15.995]IYSR.V | M[+16] | 475.226 | 3 | 1423.663 | 1423.663 | 0 | −0.3 | 2451 | 331.7 | 331.7 | 331.7 | 5.13 |
| 866 | K.VHGGTTADMIYSR.V | | 469.894 | 3 | 1407.668 | 1407.669 | 0 | 0.4 | 2451 | 303.4 | 207.9 | 207.9 | 4.79 |
| 1538 | K.VHGGTTADM[+15.995]IYSR.V | M[+16] | 475.226 | 3 | 1423.663 | 1423.663 | 0 | 0.4 | 2451 | 314.8 | 314.8 | 314.8 | 4.55 |
| 1926 | R.VREAENVAFANK.D | | 674.354 | 2 | 1347.701 | 1347.702 | 0 | 0.1 | 2464 | 491.6 | 491.6 | 491.6 | 7.64 |
| 1926 | R.VREAENVAFANK.D | | 449.905 | 3 | 1347.701 | 1347.702 | 0 | −0.3 | 2464 | 454.7 | 454.7 | 454.7 | 6.90 |
| 1926 | R.VREAENVAFANK.D | | 449.906 | 3 | 1347.702 | 1347.702 | 0 | 0.2 | 2464 | 359.2 | 359.2 | 359.2 | 5.82 |
| 890 | R.LESAGLGYR.V | | 483.256 | 2 | 965.505 | 965.505 | 0 | −0.1 | 2538 | 570.3 | 570.3 | 570.3 | 8.83 |
| 890 | R.LESAGLGYR.V | | 483.256 | 2 | 965.505 | 965.505 | 0 | 0.1 | 2538 | 547.4 | 547.4 | 547.4 | 8.10 |
| 890 | R.LESAGLGYR.V | | 483.256 | 2 | 965.505 | 965.505 | 0 | 0.3 | 2538 | 523.9 | 523.9 | 523.9 | 7.51 |
| 890 | R.LESAGLGYR.V | | 483.256 | 2 | 965.505 | 965.505 | 0 | 0.2 | 2538 | 327.2 | 327.2 | 327.2 | 5.91 |
| 1190 | R.VSMEETADRLGSIPLR.Q | | 591.977 | 3 | 1773.916 | 1773.916 | 0 | 0.0 | 2547 | 650.6 | 650.6 | 650.6 | 11.44 |
| 1190 | R.VSMEETADRLGSIPLR.Q | | 591.977 | 3 | 1773.917 | 1773.916 | 0 | 0.3 | 2547 | 582.1 | 582.1 | 582.1 | 9.44 |
| 1587 | R.VSM[+15.995]EETADRLGSIPLR.Q | M[+16] | 597.309 | 3 | 1789.911 | 1789.911 | 0 | 0.0 | 2547 | 502.2 | 465.8 | 465.8 | 7.94 |
| 1587 | R.VSM[+15.995]EETADRLGSIPLR.Q | M[+16] | 597.308 | 3 | 1789.911 | 1789.911 | 0 | −0.4 | 2547 | 469.1 | 469.1 | 469.1 | 7.19 |
| 1190 | R.VSMEETADRLGSIPLR.Q | | 591.977 | 3 | 1773.916 | 1773.916 | 0 | −0.1 | 2547 | 377.7 | 377.7 | 377.7 | 7.14 |
| 1587 | R.VSM[+15.995]EETADRLGSIPLR.Q | M[+16] | 597.309 | 3 | 1789.911 | 1789.911 | 0 | −0.2 | 2547 | 406.1 | 406.1 | 406.1 | 6.68 |
| 1190 | R.VSMEETADRLGSIPLR.Q | | 591.977 | 3 | 1773.917 | 1773.916 | 0 | 0.1 | 2547 | 332.7 | 332.7 | 332.7 | 5.63 |
| 1547 | R.VSM[+15.995JEETADR.L | M[+16] | 527.230 | 2 | 1053.452 | 1053.452 | 0 | 0.1 | 2547 | 333.9 | 333.9 | 333.9 | 5.42 |
| 2512 | R.LGSIPLRQLVYR.V | | 472.289 | 3 | 1414.853 | 1414.853 | 0 | −0.3 | 2556 | 524.3 | 524.3 | 524.3 | 7.53 |
| 1234 | R.VHALPPSLIPLVWDFGQLSDVAEKLYIQQIVQR.L | | 944.026 | 4 | 3773.082 | 3773.079 | 0 | 0.8 | 2568 | 637.0 | 637.0 | 637.0 | 9.99 |
| 1139 | R.VHALPPSLIPLVWDFGQLSDVAEK.L | | 877.810 | 3 | 2631.416 | 2631.418 | 0 | −0.6 | 2568 | 322.5 | 322.5 | 322.5 | 5.58 |
| 981 | K.LYIQQIVQR.L | | 580.843 | 2 | 1160.678 | 1160.679 | 0 | 0.2 | 2592 | 586.5 | 586.5 | 586.5 | 8.54 |
| 981 | K.LYIQQIVQR.L | | 580.843 | 2 | 1160.679 | 1160.679 | 0 | 0.1 | 2592 | 303.6 | 303.6 | 303.6 | 5.43 |
| 2006 | R.LVESISLDENGTR.V | | 716.867 | 2 | 1432.728 | 1432.728 | 0 | −0.2 | 2601 | 437.0 | 422.5 | 422.5 | 8.42 |
| 2006 | R.LVESISLDENGTR.V | | 716.868 | 2 | 1432.728 | 1432.728 | 0 | 0.3 | 2601 | 359.5 | 316.9 | 316.9 | 5.89 |
| 2006 | R.LVESISLDENGTR.V | | 478.582 | 3 | 1433.730 | 1432.728 | 1 | −0.6 | 2601 | 460.2 | 445.1 | 445.1 | 5.27 |
| 883 | R.FFPKPYDDSRLLLDEITR.A | | 742.392 | 3 | 2225.161 | 2225.160 | 0 | 0.3 | 2710 | 409.4 | 409.4 | 409.4 | 7.81 |
| 883 | R.FFPKPYDDSRLLLDEITR.A | | 557.046 | 4 | 2225.160 | 2225.160 | 0 | 0.0 | 2710 | 396.6 | 396.6 | 396.6 | 7.70 |
| 883 | R.FFPKPYDDSRLLLDEITR.A | | 557.046 | 4 | 2225.162 | 2225.160 | 0 | 0.7 | 2710 | 378.6 | 378.6 | 378.6 | 7.70 |
| 938 | R.FFPKPYDDSR.L | | 636.307 | 2 | 1271.606 | 1271.606 | 0 | 0.3 | 2710 | 460.2 | 460.2 | 460.2 | 7.57 |
| 938 | R.FFPKPYDDSR.L | | 424.540 | 3 | 1271.606 | 1271.606 | 0 | 0.1 | 2710 | 401.6 | 401.6 | 401.6 | 7.35 |
| 938 | R.FFPKPYDDSR.L | | 636.306 | 2 | 1271.605 | 1271.606 | 0 | −0.3 | 2710 | 519.6 | 519.6 | 519.6 | 7.33 |
| 938 | R.FFPKPYDDSR.L | | 424.540 | 3 | 1271.606 | 1271.606 | 0 | 0.3 | 2710 | 368.3 | 368.3 | 368.3 | 7.23 |
| 883 | R.FFPKPYDDSRLLLDEITR.A | | 1113.084 | 2 | 2225.160 | 2225.160 | 0 | 0.1 | 2710 | 445.4 | 445.4 | 445.4 | 7.22 |
| 938 | R.FFPKPYDDSR.L | | 424.540 | 3 | 1271.606 | 1271.606 | 0 | 0.2 | 2710 | 362.1 | 362.1 | 362.1 | 7.03 |
| 938 | R.FFPKPYDDSR.L | | 424.540 | 3 | 1271.606 | 1271.606 | 0 | 0.4 | 2710 | 356.2 | 356.2 | 356.2 | 5.91 |
| 938 | R.FFPKPYDDSR.L | | 424.540 | 3 | 1271.606 | 1271.606 | 0 | 0.2 | 2710 | 335.7 | 335.7 | 335.7 | 5.91 |
| 938 | R.FFPKPYDDSR.L | | 424.540 | 3 | 1271.606 | 1271.606 | 0 | 0.0 | 2710 | 341.9 | 341.9 | 341.9 | 5.71 |
| 938 | R.FFPKPYDDSR.L | | 636.306 | 2 | 1271.605 | 1271.606 | 0 | 0.1 | 2710 | 327.0 | 327.0 | 327.0 | 5.71 |
| 902 | R.LLLDEITRAQDLFLDGVPLRK.T | | 809.132 | 3 | 2425.382 | 2425.381 | 0 | 0.1 | 2720 | 699.1 | 699.1 | 699.1 | 11.36 |
| 1256 | R.LLLDEITRAQDLFLDGVPLR.K | | 766.434 | 3 | 2297.287 | 2297.286 | 0 | 0.1 | 2720 | 581.5 | 581.5 | 581.5 | 9.70 |
| 902 | R.LLLDEITRAQDLFLDGVPLRK.T | | 809.132 | 3 | 2425.382 | 2425.381 | 0 | 0.3 | 2720 | 594.2 | 594.2 | 594.2 | 9.36 |
| 1256 | R.LLLDEITRAQDLFLDGVPLR.K | | 766.434 | 3 | 2297.286 | 2297.286 | 0 | −0.1 | 2720 | 553.0 | 553.0 | 553.0 | 8.97 |
| 902 | R.LLLDEITRAQDLFLDGVPLRK.T | | 607.101 | 4 | 2425.380 | 2425.381 | 0 | −0.4 | 2720 | 429.2 | 429.2 | 429.2 | 7.48 |
| 2028 | R.LLLDEITR.A | | 486.790 | 2 | 972.573 | 972.572 | 0 | 0.2 | 2720 | 465.6 | 465.6 | 465.6 | 7.38 |
| 2028 | R.LLLDEITR.A | | 486.790 | 2 | 972.573 | 972.572 | 0 | 0.4 | 2720 | 438.3 | 438.3 | 438.3 | 7.35 |
| 2028 | R.LLLDEITR.A | | 972.573 | 1 | 972.573 | 972.572 | 0 | 0.1 | 2720 | 424.4 | 424.4 | 424.4 | 7.35 |
| 902 | R.LLLDEITRAQDLFLDGVPLRK.T | | 607.101 | 4 | 2425.382 | 2425.381 | 0 | 0.4 | 2720 | 376.9 | 376.9 | 376.9 | 7.35 |
| 2028 | R.LLLDEITR.A | | 486.790 | 2 | 972.572 | 972.572 | 0 | −0.2 | 2720 | 383.7 | 383.7 | 383.7 | 7.03 |
| 902 | R.LLLDEITRAQDLFLDGVPLRK.T | | 485.882 | 5 | 2425.381 | 2425.381 | 0 | −0.1 | 2720 | 379.4 | 379.4 | 379.4 | 6.83 |
| 902 | R.LLLDEITRAQDLFLDGVPLRK.T | | 607.101 | 4 | 2425.383 | 2425.381 | 0 | 0.6 | 2720 | 335.7 | 335.7 | 335.7 | 5.55 |
| 922 | R.AQDLFLDGVPLRK.T | | 491.280 | 3 | 1471.827 | 1471.827 | 0 | 0.0 | 2728 | 666.3 | 666.3 | 666.3 | 11.44 |
| 922 | R.AQDLFLDGVPLRK.T | | 491.280 | 3 | 1471.827 | 1471.827 | 0 | 0.0 | 2728 | 637.7 | 637.7 | 637.7 | 10.44 |
| 922 | R.AQDLFLDGVPLRK.T | | 736.417 | 2 | 1471.827 | 1471.827 | 0 | −0.2 | 2728 | 599.0 | 599.0 | 599.0 | 8.86 |
| 922 | R.AQDLFLDGVPLRK.T | | 491.280 | 3 | 1471.827 | 1471.827 | 0 | 0.0 | 2728 | 503.5 | 503.5 | 503.5 | 8.53 |
| 922 | R.AQDLFLDGVPLRK.T | | 491.280 | 3 | 1471.827 | 1471.827 | 0 | 0.0 | 2728 | 487.2 | 487.2 | 487.2 | 8.53 |
| 922 | R.AQDLFLDGVPLRK.T | | 736.417 | 2 | 1471.827 | 1471.827 | 0 | −0.2 | 2728 | 557.1 | 557.1 | 557.1 | 8.13 |
| 922 | R.AQDLFLDGVPLRK.T | | 736.417 | 2 | 1471.827 | 1471.827 | 0 | 0.0 | 2728 | 552.9 | 552.9 | 552.9 | 8.12 |
| 922 | R.AQDLFLDGVPLRK.T | | 491.280 | 3 | 1471.827 | 1471.827 | 0 | −0.1 | 2728 | 457.9 | 457.9 | 457.9 | 7.78 |
| 922 | R.AQDLFLDGVPLRK.T | | 491.281 | 3 | 1471.827 | 1471.827 | 0 | 0.1 | 2728 | 448.4 | 448.4 | 448.4 | 7.78 |
| 922 | R.AQDLFLDGVPLRK.T | | 736.417 | 2 | 1471.827 | 1471.827 | 0 | 0.0 | 2728 | 455.3 | 455.3 | 455.3 | 7.49 |
| 922 | R.AQDLFLDGVPLRK.T | | 491.280 | 3 | 1471.826 | 1471.827 | 0 | −0.3 | 2728 | 501.9 | 501.9 | 501.9 | 7.35 |
| 922 | R.AQDLFLDGVPLRK.T | | 736.417 | 2 | 1471.827 | 1471.827 | 0 | −0.1 | 2728 | 402.2 | 402.2 | 402.2 | 7.26 |
| 922 | R.AQDLFLDGVPLRK.T | | 736.417 | 2 | 1471.827 | 1471.827 | 0 | −0.2 | 2728 | 467.1 | 467.1 | 467.1 | 7.19 |
| 922 | R.AQDLFLDGVPLRK.T | | 491.281 | 3 | 1471.827 | 1471.827 | 0 | 0.1 | 2728 | 353.5 | 353.5 | 353.5 | 5.82 |
| 2639 | K.IPLFLVGKPGSSK.S | | 448.275 | 3 | 1342.809 | 1342.809 | 0 | 0.1 | 2763 | 557.5 | 557.5 | 557.5 | 8.98 |
| 1545 | K.TIVADAM[+15.995]QGPAAYSDLFR.S | M[+16] | 971.472 | 2 | 1941.937 | 1941.938 | 0 | 0.2 | 2780 | 660.3 | 660.3 | 660.3 | 11.98 |
| 850 | K.TIVADAMQGPAAYSDLFR.S | | 963.475 | 2 | 1925.943 | 1925.943 | 0 | 0.0 | 2780 | 640.1 | 640.1 | 640.1 | 10.98 |
| 850 | K.TIVADAMQGPAAYSDLFR.S | | 642.653 | 3 | 1925.944 | 1925.943 | 0 | 0.7 | 2780 | 640.4 | 640.4 | 640.4 | 10.46 |
| 850 | K.TIVADAMQGPAAYSDLFR.S | | 963.475 | 2 | 1925.942 | 1925.943 | 0 | −0.3 | 2780 | 604.4 | 604.4 | 604.4 | 10.39 |
| 850 | K.TIVADAMQGPAAYSDLFR.S | | 963.475 | 2 | 1925.943 | 1925.943 | 0 | 0.2 | 2780 | 591.8 | 591.8 | 591.8 | 9.98 |
| 850 | K.TIVADAMQGPAAYSDLFR.S | | 963.476 | 2 | 1925.945 | 1925.943 | 0 | 1.1 | 2780 | 589.9 | 589.9 | 589.9 | 9.98 |
| 850 | K.TIVADAMQGPAAYSDLFR.S | | 642.653 | 3 | 1925.943 | 1925.943 | 0 | 0.2 | 2780 | 594.1 | 594.1 | 594.1 | 9.46 |
| 850 | K.TIVADAMQGPAAYSDLFR.S | | 642.653 | 3 | 1925.946 | 1925.943 | 0 | 1.5 | 2780 | 579.5 | 579.5 | 579.5 | 9.46 |
| 850 | K.TIVADAMQGPAAYSDLFR.S | | 963.475 | 2 | 1925.942 | 1925.943 | 0 | −0.2 | 2780 | 594.8 | 594.8 | 594.8 | 9.39 |
| 850 | K.TIVADAMQGPAAYSDLFR.S | | 963.475 | 2 | 1925.944 | 1925.943 | 0 | 0.5 | 2780 | 447.3 | 447.3 | 447.3 | 8.91 |
| 850 | K.TIVADAMQGPAAYSDLFR.S | | 642.653 | 3 | 1925.943 | 1925.943 | 0 | 0.2 | 2780 | 549.2 | 549.2 | 549.2 | 8.73 |
| 850 | K.TIVADAMQGPAAYSDLFR.S | | 642.653 | 3 | 1925.944 | 1925.943 | 0 | 0.6 | 2780 | 518.5 | 518.5 | 518.5 | 8.55 |
| 850 | K.TIVADAMQGPAAYSDLFR.S | | 642.653 | 3 | 1925.944 | 1925.943 | 0 | 0.7 | 2780 | 509.9 | 509.9 | 509.9 | 8.55 |
| 850 | K.TIVADAMQGPAAYSDLFR.S | | 963.475 | 2 | 1925.942 | 1925.943 | 0 | −0.2 | 2780 | 426.8 | 426.8 | 426.8 | 8.10 |
| 850 | K.TIVADAMQGPAAYSDLFR.S | | 963.475 | 2 | 1925.943 | 1925.943 | 0 | 0.1 | 2780 | 383.3 | 383.3 | 383.3 | 7.97 |
| 850 | K.TIVADAMQGPAAYSDLFR.S | | 642.653 | 3 | 1925.943 | 1925.943 | 0 | 0.4 | 2780 | 391.7 | 391.7 | 391.7 | 7.45 |
| 850 | K.TIVADAMQGPAAYSDLFR.S | | 642.653 | 3 | 1925.943 | 1925.943 | 0 | 0.2 | 2780 | 336.4 | 336.4 | 336.4 | 5.65 |
| 1688 | R.SLKQVHLVSFQC[+57.021]SPHSTPQGIISTFR.Q | C[+57] | 739.388 | 4 | 2954.531 | 2954.531 | 0 | 0.2 | 2798 | 749.0 | 749.0 | 749.0 | 12.70 |
| 1700 | K.QVHLVSFQC[+57.021]SPHSTPQGIISTFR.Q | C[+57] | 657.586 | 4 | 2627.321 | 2626.320 | 1 | −0.8 | 2801 | 325.8 | 325.8 | 325.8 | 5.58 |
| 1416 | R.FQQGKDLQQYVSVVVLDEVGLAEDSPKMPLK.T | | 1154.272 | 3 | 3460.803 | 3460.803 | 0 | 0.2 | 2828 | 783.3 | 783.3 | 783.3 | 12.64 |
| 1416 | R.FQQGKDLQQYVSVVVLDEVGLAEDSPKMPLK.T | | 865.957 | 4 | 3460.804 | 3460.803 | 0 | 0.2 | 2828 | 751.1 | 751.1 | 751.1 | 12.64 |
| 961 | R.FQQGKDLQQYVSVVVLDEVGLAEDSPK.M | | 1496.271 | 2 | 2991.535 | 2991.531 | 0 | 1.2 | 2828 | 602.0 | 602.0 | 602.0 | 10.70 |
| 1416 | R.FQQGKDLQQYVSVVVLDEVGLAEDSPKMPLK.T | | 865.956 | 4 | 3460.803 | 3460.803 | 0 | −0.1 | 2828 | 695.1 | 695.1 | 695.1 | 10.64 |
| 1416 | R.FQQGKDLQQYVSVVVLDEVGLAEDSPKMPLK.T | | 865.956 | 4 | 3460.803 | 3460.803 | 0 | 0.0 | 2828 | 653.6 | 653.6 | 653.6 | 10.64 |
| 1416 | R.FQQGKDLQQYVSVVVLDEVGLAEDSPKMPLK.T | | 865.956 | 4 | 3460.802 | 3460.803 | 0 | 0.5 | 2828 | 654.0 | 654.0 | 654.0 | 10.06 |
| 961 | R.FQQGKDLQQYVSVVVLDEVGLAEDSPK.M | | 1496.270 | 2 | 2991.532 | 2991.531 | 0 | 0.4 | 2828 | 533.7 | 533.7 | 533.7 | 8.97 |
| 1416 | R.FQQGKDLQQYVSVVVLDEVGLAEDSPKMPLK.T | | 692.966 | 5 | 3460.803 | 3460.803 | 0 | −0.2 | 2828 | 639.2 | 639.2 | 639.2 | 8.54 |
| 1416 | R.FQQGKDLQQYVSVVVLDEVGLAEDSPKMPLK.T | | 865.957 | 4 | 3460.804 | 3460.803 | 0 | 0.2 | 2828 | 555.5 | 555.5 | 555.5 | 7.91 |
| 961 | R.FQQGKDLQQYVSVVVLDEVGLAEDSPK.M | | 997.849 | 3 | 2991.533 | 2991.531 | 0 | 0.8 | 2828 | 450.0 | 450.0 | 450.0 | 7.75 |
| 961 | R.FQQGKDLQQYVSVVVLDEVGLAEDSPK.M | | 748.639 | 4 | 2991.533 | 2991.531 | 0 | 0.8 | 2828 | 462.2 | 462.2 | 462.2 | 7.52 |
| 1416 | R.FQQGKDLQQYVSVVVLDEVGLAEDSPKMPLK.T | | 692.967 | 5 | 3460.804 | 3460.803 | 0 | 0.2 | 2828 | 530.5 | 530.5 | 530.5 | 7.39 |
| 961 | R.FQQGKDLQQYVSVVVLDEVGLAEDSPK.M | | 997.850 | 3 | 2991.534 | 2991.531 | 0 | 1.0 | 2828 | 395.6 | 395.6 | 395.6 | 7.22 |
| 1617 | R.FQQGKDLQQYVSVVVLDEVGLAEDSPKM[+15.995]PLK.T | M[+16] | 869.955 | 4 | 3476.799 | 3476.798 | 0 | 0.4 | 2828 | 488.0 | 488.0 | 488.0 | 7.14 |
| 961 | R.FQQGKDLQQYVSVVVLDEVGLAEDSPK.M | | 748.639 | 4 | 2991.533 | 2991.531 | 0 | 0.5 | 2828 | 400.2 | 400.2 | 400.2 | 7.00 |
| 1617 | R.FQQGKDLQQYVSVVVLDEVGLAEDSPKM[+15.995]PLK.T | M[+16] | 696.166 | 5 | 3476.801 | 3476.798 | 0 | 0.8 | 2828 | 471.4 | 471.4 | 471.4 | 6.17 |
| 961 | R.FQQGKDLQQYVSVVVLDEVGLAEDSPK.M | | 748.639 | 4 | 2991.533 | 2991.531 | 0 | 0.5 | 2828 | 336.5 | 336.5 | 336.5 | 5.56 |
| 961 | R.FQQGKDLQQYVSVVVLDEVGLAEDSPK.M | | 748.639 | 4 | 2991.533 | 2991.531 | 0 | 0.7 | 2828 | 358.9 | 358.9 | 358.9 | 5.18 |
| 961 | R.FQQGKDLQQYVSVVVLDEVGLAEDSPK.M | | 748.639 | 4 | 2991.533 | 2991.531 | 0 | 0.5 | 2828 | 309.4 | 309.4 | 309.4 | 5.09 |
| 1546 | K.DLQQYVSVVVLDEVGLAEDSPKM[+15.995]PLK.T | M[+16] | 722.880 | 4 | 2888.497 | 2888.496 | 0 | 0.3 | 2833 | 629.1 | 629.1 | 629.1 | 10.19 |
| 932 | K.DLQQYVSVVVLDEVGLAEDSPK.M | | 1202.120 | 2 | 2403.232 | 2403.229 | 0 | 1.4 | 2833 | 530.8 | 449.4 | 449.4 | 9.25 |
| 1171 | K.DLQQYVSVVVLDEVGLAEDSPKMPLK.T | | 958.173 | 3 | 2872.504 | 2872.501 | 0 | 0.9 | 2833 | 571.1 | 536.8 | 536.8 | 9.11 |
| 1171 | K.DLQQYVSVVVLDEVGLAEDSPKMPLK.T | | 958.174 | 3 | 2872.507 | 2872.501 | 0 | 1.9 | 2833 | 554.1 | 554.1 | 554.1 | 8.97 |
| 1171 | K.DLQQYVSVVVLDEVGLAEDSPKMPLK.T | | 1436.756 | 2 | 2872.506 | 2872.501 | 0 | 1.5 | 2833 | 473.8 | 389.5 | 389.5 | 8.64 |
| 932 | K.DLQQYVSVVVLDEVGLAEDSPK.M | | 801.749 | 3 | 2403.232 | 2403.229 | 0 | 1.2 | 2833 | 487.8 | 427.5 | 427.5 | 7.95 |
| 1546 | K.DLQQYVSVVVLDEVGLAEDSPKM[+15.995]PLK.T | M[+16] | 722.880 | 4 | 2888.496 | 2888.496 | 0 | 0.0 | 2833 | 558.9 | 551.5 | 551.5 | 7.86 |
| 1171 | K.DLQQYVSVVVLDEVGLAEDSPKMPLK.T | | 575.306 | 5 | 2872.502 | 2872.501 | 0 | 0.2 | 2833 | 472.4 | 472.4 | 472.4 | 7.52 |
| 1686 | K.MPLKTLHPLLEDGC[+57.021]IEDDPAPHKK.V | C[+57] | 689.355 | 4 | 2754.397 | 2754.395 | 0 | 0.7 | 2855 | 581.4 | 581.4 | 581.4 | 7.94 |
| 1686 | K.MPLKTLHPLLEDGC[+57.021]IEDDPAPHKK.V | C[+57] | 459.905 | 6 | 2754.395 | 2754.395 | 0 | 0.0 | 2855 | 414.2 | 414.2 | 414.2 | 7.47 |
| 1723 | K.TLHPLLEDGC[+57.021]IEDDPAPHKK.V | C[+57] | 572.036 | 4 | 2285.121 | 2285.123 | 0 | 0.9 | 2859 | 867.9 | 867.9 | 867.9 | 15.11 |
| 1723 | K.TLHPLLEDGC[+57.021]IEDDPAPHKK.V | C[+57] | 457.830 | 5 | 2285.123 | 2285.123 | 0 | 0.0 | 2859 | 723.2 | 670.0 | 670.0 | 12.70 |
| 1723 | K.TLHPLLEDGC[+57.021]IEDDPAPHKK.V | C[+57] | 762.380 | 3 | 2285.124 | 2285.123 | 0 | 0.4 | 2859 | 703.1 | 703.1 | 703.1 | 11.28 |
| 1723 | K.TLHPLLEDGC[+57.021]IEDDPAPHKK.V | C[+57] | 572.036 | 4 | 2285.123 | 2285.123 | 0 | 0.1 | 2859 | 542.4 | 542.4 | 542.4 | 8.97 |
| 1966 | K.KVGFVGISNWALDPAK.M | | 567.982 | 3 | 1701.932 | 1701.932 | 0 | 0.0 | 2878 | 351.5 | 351.5 | 351.5 | 5.91 |
| 836 | K.VGFVGISNWALDPAK.M | | 787.422 | 2 | 1573.837 | 1573.837 | 0 | −0.1 | 2879 | 662.9 | 662.9 | 662.9 | 11.72 |
| 1530 | K.VGFVGISNWALDPAKM[+15.995]NR.G | M[+16] | 664.345 | 3 | 1991.019 | 1991.017 | 0 | 1.2 | 2879 | 660.5 | 660.5 | 660.5 | 11.70 |
| 1530 | K.VGFVGISNWALDPAKM[+15.995]NR.G | M[+16] | 664.344 | 3 | 1991.018 | 1991.017 | 0 | 0.8 | 2879 | 628.6 | 628.6 | 628.6 | 10.70 |
| 1006 | K.VGFVGISNWALDPAKMNR.G | | 659.012 | 3 | 1975.023 | 1975.022 | 0 | 0.4 | 2879 | 582.1 | 582.1 | 582.1 | 9.70 |
| 836 | K.VGFVGISNWALDPAK.M | | 787.422 | 2 | 1573.836 | 1573.837 | 0 | −0.6 | 2879 | 577.6 | 577.6 | 577.6 | 9.13 |
| 836 | K.VGFVGISNWALDPAK.M | | 787.422 | 2 | 1573.836 | 1573.837 | 0 | −0.6 | 2879 | 566.1 | 566.1 | 566.1 | 9.13 |
| 1530 | K.VGFVGISNWALDPAKM[+15.995]NR.G | M[+16] | 996.012 | 2 | 1991.017 | 1991.017 | 0 | 0.1 | 2879 | 478.9 | 478.9 | 478.9 | 8.64 |
| 1006 | K.VGFVGISNWALDPAKMNR.G | | 659.012 | 3 | 1975.020 | 1975.022 | 0 | 0.8 | 2879 | 557.6 | 557.6 | 557.6 | 8.39 |
| 836 | K.VGFVGISNWALDPAK.M | | 787.422 | 2 | 1573.837 | 1573.837 | 0 | −0.4 | 2879 | 501.2 | 501.2 | 501.2 | 8.22 |
| 836 | K.VGFVGISNWALDPAK.M | | 787.422 | 2 | 1573.838 | 1573.837 | 0 | 0.1 | 2879 | 510.7 | 510.7 | 510.7 | 8.21 |
| 836 | K.VGFVGISNWALDPAK.M | | 525.284 | 3 | 1573.837 | 1573.837 | 0 | −0.3 | 2879 | 454.8 | 454.8 | 454.8 | 6.66 |
| 1530 | K.VGFVGISNWALDPAKM[+15.995]NR.G | M[+16] | 664.344 | 3 | 1991.018 | 1991.017 | 0 | 0.4 | 2879 | 319.8 | 319.8 | 319.8 | 5.80 |
| 836 | K.VGFVGISNWALDPAK.M | | 525.618 | 3 | 1574.840 | 1573.837 | 1 | −0.2 | 2879 | 389.3 | 389.3 | 389.3 | 5.22 |
| 1105 | R.GIFVSRGSPNETELIESAK.G | | 678.689 | 3 | 2034.051 | 2034.050 | 0 | 0.5 | 2897 | 508.2 | 498.7 | 498.7 | 8.79 |
| 990 | R.GSPNETELIESAK.G | | 687.841 | 2 | 1374.675 | 1374.675 | 0 | 0.2 | 2903 | 640.9 | 640.9 | 640.9 | 10.72 |
| 990 | R.GSPNETELIESAK.G | | 687.841 | 2 | 1374.675 | 1374.675 | 0 | 0.0 | 2903 | 632.4 | 632.4 | 632.4 | 10.72 |
| 1737 | R.GSPNETELIESAKGIC[+57.021]SSDILVQDR.V | C[+57] | 906.780 | 3 | 2718.326 | 2718.325 | 0 | 0.5 | 2903 | 603.2 | 603.2 | 603.2 | 10.11 |
| 990 | R.GSPNETELIESAK.G | | 687.841 | 2 | 1374.675 | 1374.675 | 0 | −0.1 | 2903 | 590.4 | 590.4 | 590.4 | 9.72 |
| 990 | R.GSPNETELIESAK.G | | 458.896 | 3 | 1374.675 | 1374.675 | 0 | −0.1 | 2903 | 560.3 | 559.2 | 559.2 | 9.20 |
| 990 | R.GSPNETELIESAK.G | | 458.896 | 3 | 1374.675 | 1374.675 | 0 | −0.1 | 2903 | 464.9 | 450.9 | 450.9 | 7.53 |
| 990 | R.GSPNETELIESAK.G | | 458.896 | 3 | 1374.675 | 1374.675 | 0 | −0.1 | 2903 | 347.6 | 347.6 | 347.6 | 5.58 |
| 990 | R.GSPNETELIESAK.G | | 687.840 | 2 | 1374.673 | 1374.675 | 0 | −1.1 | 2903 | 346.5 | 346.5 | 346.5 | 5.51 |
| 990 | R.GSPNETELIESAK.G | | 458.896 | 3 | 1374.675 | 1374.675 | 0 | −0.1 | 2903 | 341.7 | 341.7 | 341.7 | 5.19 |
| 1862 | R.VQGYFASFAK.A | | 559.287 | 2 | 1117.567 | 1117.568 | 0 | −0.3 | 2928 | 436.1 | 436.1 | 436.1 | 6.95 |
| 1862 | R.VQGYFASFAK.A | | 559.287 | 2 | 1117.567 | 1117.568 | 0 | −0.4 | 2928 | 319.3 | 319.3 | 319.3 | 4.85 |
| 877 | K.RQDKEFFGLR.D | | 432.567 | 3 | 1295.686 | 1295.686 | 0 | 0.3 | 2945 | 503.5 | 503.5 | 503.5 | 7.64 |
| 2123 | R.QDKEFFGLRDYYSLIK.M | | 506.264 | 4 | 2022.033 | 2022.033 | 0 | 0.0 | 2946 | 395.2 | 395.2 | 395.2 | 7.09 |
| 2041 | R.DYYSLIK.M | | 451.237 | 2 | 901.467 | 901.467 | 0 | 0.4 | 2955 | 396.1 | 396.1 | 396.1 | 6.74 |
| 1007 | K.ASNRKPSPQDIAQAVLR.N | | 617.678 | 3 | 1851.020 | 1851.020 | 0 | 0.2 | 2969 | 644.3 | 644.3 | 644.3 | 10.70 |
| 1007 | K.ASNRKPSPQDIAQAVLR.N | | 617.678 | 3 | 1851.020 | 1851.020 | 0 | 0.1 | 2969 | 446.1 | 446.1 | 446.1 | 8.64 |
| 1007 | K.ASNRKPSPQDIAQAVLR.N | | 617.678 | 3 | 1851.020 | 1851.020 | 0 | 0.4 | 2969 | 464.2 | 464.2 | 464.2 | 8.04 |
| 1007 | K.ASNRKPSPQDIAQAVLR.N | | 617.678 | 3 | 1851.020 | 1851.020 | 0 | 0.1 | 2969 | 389.8 | 389.8 | 389.8 | 7.70 |
| 839 | R.KPSPQDIAQAVLR.N | | 474.940 | 3 | 1422.806 | 1422.806 | 0 | −0.3 | 2973 | 532.2 | 532.2 | 532.2 | 8.40 |
| 839 | R.KPSPQDIAQAVLR.N | | 474.940 | 3 | 1422.806 | 1422.806 | 0 | 0.0 | 2973 | 440.3 | 440.3 | 440.3 | 7.76 |
| 839 | R.KPSPQDIAQAVLR.N | | 474.940 | 3 | 1422.806 | 1422.806 | 0 | −0.2 | 2973 | 396.0 | 396.0 | 396.0 | 7.42 |
| 839 | R.KPSPQDIAQAVLR.N | | 474.940 | 3 | 1422.806 | 1422.806 | 0 | 0.0 | 2973 | 371.4 | 371.4 | 371.4 | 7.23 |
| 839 | R.KPSPQDIAQAVLR.N | | 475.275 | 3 | 1423.809 | 1422.806 | 1 | −0.3 | 2973 | 388.9 | 305.9 | 305.9 | 3.72 |
| 815 | R.NFSGKDDIQALDIFLANLPEAK.C | | 1210.129 | 2 | 2419.250 | 2419.250 | 0 | −0.1 | 2986 | 607.9 | 607.9 | 607.9 | 10.70 |
| 815 | R.NFSGKDDIQALDIFLANLPEAK.C | | 1210.129 | 2 | 2419.252 | 2419.250 | 0 | 0.5 | 2986 | 568.7 | 523.7 | 523.7 | 9.70 |
| 1490 | R.N[+0.984]FSGKDDIQALDIFLANLPEAK.C | N[+1] | 807.417 | 3 | 2420.235 | 2420.234 | 0 | 0.4 | 2986 | 412.8 | 412.8 | 339.0 | 7.81 |
| 815 | R.NFSGKDDIQALDIFLANLPEAK.C | | 807.088 | 3 | 2419.250 | 2419.250 | 0 | 0.0 | 2986 | 395.6 | 395.6 | 395.6 | 7.70 |
| 815 | R.NFSGKDDIQALDIFLANLPEAK.C | | 807.089 | 3 | 2419.252 | 2419.250 | 0 | 0.5 | 2986 | 444.1 | 444.1 | 444.1 | 7.56 |
| 1490 | R.N[+0.984]FSGKDDIQALDIFLANLPEAK.C | N[+1] | 807.416 | 3 | 2420.235 | 2420.234 | 0 | 0.1 | 2986 | 410.3 | 410.3 | 319.4 | 7.52 |
| 815 | R.NFSGKDDIQALDIFLANLPEAK.C | | 807.089 | 3 | 2419.254 | 2419.250 | 0 | 1.4 | 2986 | 433.4 | 433.4 | 433.4 | 7.33 |
| 815 | R.NFSGKDDIQALDIFLANLPEAK.C | | 807.089 | 3 | 2419.251 | 2419.250 | 0 | 0.3 | 2986 | 364.5 | 364.5 | 364.5 | 7.22 |
| 815 | R.NFSGKDDIQALDIFLANLPEAK.C | | 605.568 | 4 | 2419.252 | 2419.250 | 0 | 0.5 | 2986 | 321.2 | 321.2 | 321.2 | 5.56 |
| 815 | R.NFSGKDDIQALDIFLANLPEAK.C | | 807.089 | 3 | 2419.251 | 2419.250 | 0 | 0.4 | 2986 | 317.2 | 295.8 | 295.8 | 5.12 |
| 815 | R.NFSGKDDIQALDIFLANLPEAK.C | | 807.090 | 3 | 2419.254 | 2419.250 | 0 | 1.6 | 2986 | 306.7 | 306.7 | 306.7 | 5.12 |
| 876 | K.DDIQALDIFLANLPEAK.C | | 629.336 | 3 | 1885.992 | 1885.991 | 0 | 0.9 | 2991 | 474.6 | 474.6 | 474.6 | 7.79 |
| 1717 | K.C[+57.021]SEEVSPMQLIK.Q | C[+57 | 710.844 | 2 | 1420.681 | 1420.681 | 0 | 0.3 | 3008 | 509.3 | 422.2 | 422.2 | 8.80 |
| 1717 | K.C[+57.021]SEEVSPMQLIK.Q | C[+57] | 710.844 | 2 | 1420.681 | 1420.681 | 0 | −0.2 | 3008 | 500.8 | 463.9 | 463.9 | 8.80 |
| 1671 | K.C[+57.021]SEEVSPM[+15.995]QLIK.Q | C[+57], | 718.842 | 2 | 1436.676 | 1436.676 | 0 | 0.1 | 3008 | 467.0 | 299.7 | 299.7 | 6.61 |
| | | M[+16] | | | | | | | | | | | |
| 1166 | K.QNIFGPSQKVPGGEQEDAESR.Y | | 758.365 | 3 | 2273.079 | 2273.079 | 0 | −0.1 | 3020 | 873.7 | 873.7 | 873.7 | 15.65 |
| 1166 | K.QNIFGPSQKVPGGEQEDAESR.Y | | 758.365 | 3 | 2273.079 | 2273.079 | 0 | −0.1 | 3020 | 843.4 | 843.4 | 843.4 | 14.70 |
| 1166 | K.QNIFGPSQKVPGGEQEDAESR.Y | | 758.365 | 3 | 2273.080 | 2273.079 | 0 | 0.2 | 3020 | 745.6 | 745.6 | 745.6 | 12.70 |
| 940 | K.QNIFGPSQKVPGGEQEDAESRYLLVLTK.N | | 1035.207 | 3 | 3103.605 | 3103.606 | 0 | −0.2 | 3020 | 681.6 | 681.6 | 681.6 | 10.77 |
| 940 | K.QNIFGPSQKVPGGEQEDAESRYLLVLTK.N | | 776.657 | 4 | 3103.607 | 3103.606 | 0 | 0.3 | 3020 | 625.3 | 625.3 | 625.3 | 10.36 |
| 940 | K.QNIFGPSQKVPGGEQEDAESRYLLVLTK.N | | 776.657 | 4 | 3103.605 | 3103.606 | 0 | −0.3 | 3020 | 504.3 | 504.3 | 504.3 | 7.86 |
| 1784 | K.VPGGEQEDAESRYLLVLTK.N | | 702.036 | 3 | 2104.092 | 2104.092 | 0 | 0.0 | 3029 | 303.6 | 303.6 | 303.6 | 5.42 |
| 1950 | R.YLLVLTK.N | | 425.276 | 2 | 849.545 | 849.544 | 0 | 0.3 | 3041 | 362.9 | 362.9 | 362.9 | 7.03 |
| 1732 | K.NYVALQILQQTFFEGDQQPEIIFGSGFPKDQEYTQLC[+57.021] | C[+57 | 1127.803 | 4 | 4508.191 | 4508.187 | 0 | 0.9 | 3048 | 950.2 | 950.2 | 950.2 | 30.00 |
| | R.N | | | | | | | | | | | | |
| 957 | K.NYVALQILQQTFFEGDQQPEIIFGSGFPK.D | | 1105.563 | 3 | 3314.675 | 3314.673 | 0 | 0.4 | 3048 | 723.2 | 723.2 | 723.2 | 11.75 |
| 1732 | K.NYVALQILQQTFFEGDQQPEIIFGSGFPKDQEYTQLC[+57.021] | C[+57] | 1127.805 | 4 | 4508.197 | 4508.187 | 0 | 2.3 | 3048 | 686.5 | 673.9 | 673.9 | 9.06 |
| | R.N | | | | | | | | | | | | |
| 1732 | K.NYVALQILQQTFFEGDQQPEIIFGSGFPKDQEYTQLC[+57.021] | C[+57] | 902.444 | 5 | 4508.190 | 4508.187 | 0 | 0.7 | 3048 | 573.9 | 573.9 | 573.9 | 8.47 |
| | R.N | | | | | | | | | | | | |
| 957 | K.NYVALQILQQTFFEGDQQPEIIFGSGFPK.D | | 829.424 | 4 | 3314.674 | 3314.673 | 0 | 0.2 | 3048 | 586.0 | 541.0 | 541.0 | 8.15 |
| 1693 | K.DQEYTQLC[+57.021]R.N | C[+57] | 607.270 | 2 | 1213.534 | 1212.531 | 1 | −1.0 | 3077 | 358.0 | 266.8 | 266.8 | 2.86 |
| 1093 | K.YVDLGLGTHR.V | | 565.801 | 2 | 1130.595 | 1130.595 | 0 | −0.5 | 3128 | 670.7 | 670.7 | 670.7 | 11.13 |
| 1806 | R.LIVIEEK.D | | 422.263 | 2 | 843.519 | 843.519 | 00 | 0.1 | 3148 | 365.1 | 365.1 | 365.1 | 6.74 |
| 1806 | R.LIVIEEK.D | | 422.263 | 2 | 843.519 | 843.519 | | 0.0 | 3148 | 302.1 | 302.1 | 302.1 | 5.43 |
| 2000 | K.HYLDINTVLEK.W | | 448.910 | 3 | 1344.716 | 1344.716 | 0 | 0.2 | 3172 | 374.8 | 374.8 | 374.8 | 7.23 |
| 872 | R.ALTEELHQKVSEEAK.S | | 428.727 | 4 | 1711.887 | 1711.886 | 0 | 0.2 | 3241 | 490.7 | 399.5 | 399.5 | 8.53 |
| 872 | R.ALTEELHQKVSEEAK.S | | 428.727 | 4 | 1711.886 | 1711.886 | 0 | −0.2 | 3241 | 569.9 | 569.9 | 569.9 | 8.26 |
| 872 | R.ALTEELHQKVSEEAK.S | | 428.727 | 4 | 1711.885 | 1711.886 | 0 | 0.4 | 3241 | 507.2 | 507.2 | 507.2 | 7.95 |
| 872 | R.ALTEELHQKVSEEAK.S | | 428.727 | 4 | 1711.886 | 1711.886 | 0 | −0.2 | 3241 | 479.6 | 479.6 | 479.6 | 7.79 |
| 872 | R.ALTEELHQKVSEEAK.S | | 428.727 | 4 | 1711.887 | 1711.886 | 0 | 0.2 | 3241 | 477.3 | 477.3 | 477.3 | 7.78 |
| 872 | R.ALTEELHQKVSEEAK.S | | 428.727 | 4 | 1711.887 | 1711.886 | 0 | 0.2 | 3241 | 429.1 | 429.1 | 429.1 | 7.55 |
| 872 | R.ALTEELHQKVSEEAK.S | | 571.300 | 3 | 1711.885 | 1711.886 | 0 | −0.5 | 3241 | 550.7 | 550.7 | 550.7 | 7.53 |
| 872 | R.ALTEELHQKVSEEAK.S | | 428.727 | 4 | 1711.885 | 1711.886 | 0 | 0.4 | 3241 | 451.6 | 451.6 | 451.6 | 7.19 |
| 872 | R.ALTEELHQKVSEEAK.S | | 571.300 | 3 | 1711.886 | 1711.886 | 0 | −0.2 | 3241 | 421.4 | 421.4 | 421.4 | 6.49 |
| 1721 | K.VSEEAKSILLNC[+57.021]ATPDAVVR.L | C[+57] | 724.716 | 3 | 2172.134 | 2172.133 | 0 | 0.5 | 3250 | 448.7 | 448.7 | 448.7 | 8.04 |
| 1721 | K.VSEEAKSILLNC[+57.021]ATPDAVVR.L | C[+57] | 724.716 | 3 | 2172.133 | 2172.133 | 0 | 0.2 | 3250 | 487.1 | 344.0 | 344.0 | 6.96 |
| 1695 | K.SILLNC[+57.021]ATPDAVVR.L | C[+57] | 764.911 | 2 | 1528.815 | 1528.815 | 0 | −0.1 | 3256 | 693.2 | 588.5 | 588.5 | 11.72 |
| 1695 | K.SILLNC[+57.021]ATPDAVVR.L | C[+57] | 510.277 | 3 | 1528.816 | 1528.815 | 0 | 0.2 | 3256 | 445.2 | 445.2 | 445.2 | 7.24 |
| 1695 | K.SILLNC[+57.021]ATPDAVVR.L | C[+57] | 765.412 | 2 | 1529.818 | 1528.815 | 1 | −0.7 | 3256 | 354.5 | 279.9 | 279.9 | 3.35 |
| 1173 | R.LSAYSLGGFAAEWLSQEYFHR.Q | | 811.395 | 3 | 2432.170 | 2432.167 | 0 | 1.1 | 3270 | 875.5 | 875.5 | 875.5 | 15.95 |
| 1173 | R.LSAYSLGGFAAEWLSQEYFHR.Q | | 608.798 | 4 | 2432.169 | 2432.167 | 0 | 0.7 | 3270 | 722.9 | 722.9 | 722.9 | 12.46 |
| 1173 | R.LSAYSLGGFAAEWLSQEYFHR.Q | | 811.394 | 3 | 2432.168 | 2432.167 | 0 | 0.2 | 3270 | 685.7 | 685.7 | 685.7 | 11.98 |
| 1173 | R.LSAYSLGGFAAEWLSQEYFHR.Q | | 811.394 | 3 | 2432.167 | 2432.167 | 0 | 0.1 | 3270 | 625.6 | 625.6 | 625.6 | 10.98 |
| 1173 | R.LSAYSLGGFAAEWLSQEYFHR.Q | | 811.394 | 3 | 2432.167 | 2432.167 | 0 | −0.2 | 3270 | 474.8 | 474.8 | 474.8 | 8.91 |
| 1005 | R.QRHNSFADFLQAHLHTADLER.H | | 502.053 | 5 | 2506.233 | 2506.233 | 0 | 0.0 | 3291 | 578.2 | 578.2 | 578.2 | 9.70 |
| 1005 | R.QRHNSFADFLQAHLHTADLER.H | | 836.083 | 3 | 2506.233 | 2506.233 | 0 | −0.1 | 3291 | 635.5 | 635.5 | 635.5 | 9.28 |
| 1005 | R.QRHNSFADFLQAHLHTADLER.H | | 418.545 | 6 | 2506.234 | 2506.233 | 0 | 0.1 | 3291 | 468.1 | 468.1 | 468.1 | 8.64 |
| 1005 | R.QRHNSFADFLQAHLHTADLER.H | | 502.053 | 5 | 2506.234 | 2506.233 | 0 | 0.2 | 3291 | 464.2 | 464.2 | 464.2 | 8.64 |
| 1005 | R.QRHNSFADFLQAHLHTADLER.H | | 502.053 | 5 | 2506.234 | 2506.233 | 0 | 0.1 | 3291 | 451.3 | 451.3 | 451.3 | 7.75 |
| 1005 | R.QRHNSFADFLQAHLHTADLER.H | | 627.314 | 4 | 2506.235 | 2506.233 | 0 | 0.5 | 3291 | 558.4 | 558.4 | 558.4 | 7.55 |
| 854 | R.HNSFADFLQAHLHTADLER.H | | 445.221 | 5 | 2222.074 | 2222.074 | 0 | 0.0 | 3293 | 564.8 | 564.8 | 564.8 | 9.98 |
| 854 | R.HNSFADFLQAHLHTADLER.H | | 445.221 | 5 | 2222.074 | 2222.074 | 0 | 0.2 | 3293 | 542.0 | 542.0 | 542.0 | 9.25 |
| 854 | R.HNSFADFLQAHLHTADLER.H | | 556.274 | 4 | 2222.074 | 2222.074 | 0 | 0.1 | 3293 | 533.1 | 533.1 | 533.1 | 9.25 |
| 854 | R.HNSFADFLQAHLHTADLER.H | | 556.274 | 4 | 2222.074 | 2222.074 | 0 | −0.1 | 3293 | 540.9 | 540.9 | 540.9 | 8.65 |
| 854 | R.HNSFADFLQAHLHTADLER.H | | 556.274 | 4 | 2222.074 | 2222.074 | 0 | 0.2 | 3293 | 379.9 | 324.2 | 324.2 | 6.26 |
| 943 | R.HAIFTEITTFSR.L | | 711.872 | 2 | 1422.738 | 1422.738 | 0 | 0.0 | 3312 | 558.5 | 558.5 | 558.5 | 8.39 |
| 943 | R.HAIFTEITTFSR.L | | 474.917 | 3 | 1422.738 | 1422.738 | 0 | 0.0 | 3312 | 455.0 | 455.0 | 455.0 | 8.05 |
| 943 | R.HAIFTEITTFSR.L | | 474.917 | 3 | 1422.737 | 1422.738 | 0 | −0.2 | 3312 | 429.4 | 429.4 | 429.4 | 7.83 |
| 943 | R.HAIFTEITTFSR.L | | 474.917 | 3 | 1422.737 | 1422.738 | 0 | −0.1 | 3312 | 371.9 | 371.9 | 371.9 | 7.23 |
| 943 | R.HAIFTEITTFSR.L | | 474.917 | 3 | 1422.738 | 1422.738 | 0 | 0.0 | 3312 | 361.2 | 361.2 | 361.2 | 7.23 |
| 943 | R.HAIFTEITTFSR.L | | 711.873 | 2 | 1422.738 | 1422.738 | 0 | 0.4 | 3312 | 359.7 | 359.7 | 359.7 | 6.09 |
| 1143 | R.APKPTLLWLQQFDTEYSFLKEVR.N | | 937.168 | 3 | 2809.489 | 2809.492 | 0 | 1.0 | 3341 | 705.9 | 705.9 | 705.9 | 12.12 |
| 894 | R.APKPTLLWLQQFDTEYSFLK.E | | 809.099 | 3 | 2425.281 | 2425.280 | 0 | 0.3 | 3341 | 526.5 | 526.5 | 526.5 | 9.25 |
| 1143 | R.APKPTLLWLQQFDTEYSFLKEVR.N | | 703.128 | 4 | 2809.492 | 2809.492 | 0 | −0.1 | 3341 | 548.8 | 548.8 | 548.8 | 8.97 |
| 894 | R.APKPTLLWLQQFDTEYSFLK.E | | 809.098 | 3 | 2425.280 | 2425.280 | 0 | 0.1 | 3341 | 461.3 | 461.3 | 461.3 | 8.31 |
| 1143 | R.APKPTLLWLQQFDTEYSFLKEVR.N | | 703.129 | 4 | 2809.493 | 2809.492 | 0 | 0.2 | 3341 | 442.4 | 442.4 | 442.4 | 8.04 |
| 894 | R.APKPTLLWLQQFDTEYSFLK.E | | 809.433 | 3 | 2426.286 | 2425.280 | 1 | 0.8 | 3341 | 423.0 | 423.0 | 423.0 | 7.80 |
| 894 | R.APKPTLLWLQQFDTEYSFLK.E | | 607.076 | 4 | 2425.280 | 2425.280 | 0 | 0.0 | 3341 | 405.5 | 405.5 | 405.5 | 7.28 |
| 1143 | R.APKPTLLWLQQFDTEYSFLKEVR.N | | 703.129 | 4 | 2809.494 | 2809.492 | 0 | 0.5 | 3341 | 382.8 | 382.8 | 382.8 | 7.22 |
| 2170 | K.ILIFQTDFEDGIR.S | | 783.912 | 2 | 1566.817 | 1566.816 | 0 | 0.4 | 3374 | 526.6 | 526.6 | 526.6 | 8.98 |
| 2170 | K.ILIFQTDFEDGIR.S | | 783.912 | 2 | 1566.817 | 1566.816 | 0 | 0.4 | 3374 | 469.5 | 469.5 | 469.5 | 8.05 |
| 2170 | K.ILIFQTDFEDGIR.S | | 783.912 | 2 | 1566.817 | 1566.816 | 0 | 0.1 | 3374 | 431.8 | 431.8 | 431.8 | 7.53 |
| 848 | K.YSVINEINK.I | | 540.290 | 2 | 1079.573 | 1079.573 | 0 | −0.4 | 3396 | 481.2 | 481.2 | 481.2 | 7.33 |
| 1965 | R.IFVYFITK.L | | 515.798 | 2 | 1030.588 | 1030.597 | 0 | 8.5 | 3412 | 360.5 | 360.5 | 360.5 | 5.18 |
| 855 | R.RSTLMVSDVTR.L | | 422.228 | 3 | 1264.668 | 1264.668 | 0 | 0.1 | 3447 | 475.5 | 475.5 | 475.5 | 7.76 |
| 855 | R.RSTLMVSDVTR.L | | 422.228 | 3 | 1264.668 | 1264.668 | 0 | 0.2 | 3447 | 467.3 | 467.3 | 467.3 | 7.57 |
| 1581 | R.RSTLM[+15.995]VSDVTR.L | M[+16] | 427.559 | 3 | 1280.662 | 1280.663 | 0 | −0.2 | 3447 | 404.2 | 404.2 | 404.2 | 7.35 |
| 1242 | R.STLMVSDVTRLQHVTISQLFAPGDLPELGLEHR.A | | 915.736 | 4 | 3659.922 | 3659.921 | 0 | 0.3 | 3448 | 638.1 | 638.1 | 638.1 | 9.99 |
| 1242 | R.STLMVSDVTRLQHVTISQLFAPGDLPELGLEHR.A | | 732.790 | 5 | 3659.923 | 3659.921 | 0 | 0.4 | 3448 | 622.5 | 622.5 | 622.5 | 9.99 |
| 845 | R.STLMVSDVTR.L | | 554.787 | 2 | 1108.567 | 1108.567 | 0 | −0.2 | 3448 | 551.2 | 551.2 | 551.2 | 7.80 |
| 1579 | R.STLM[+15.995]VSDVTR.L | M[+16] | 562.784 | 2 | 1124.561 | 1124.562 | 0 | −0.6 | 3448 | 472.8 | 472.8 | 472.8 | 7.47 |
| 1579 | R.STLM[+15.995]VSDVTR.L | M[+16] | 562.784 | 2 | 1124.562 | 1124.562 | 0 | 0.0 | 3448 | 385.5 | 363.2 | 363.2 | 7.23 |
| 1579 | R.STLM[+15.995]VSDVTR.L | M[+16] | 562.784 | 2 | 1124.561 | 1124.562 | 0 | −0.5 | 3448 | 458.8 | 458.8 | 458.8 | 7.18 |
| 845 | R.STLMVSDVTR.L | | 554.787 | 2 | 1108.567 | 1108.567 | 0 | −0.2 | 3448 | 373.1 | 373.1 | 373.1 | 6.64 |
| 845 | R.STLMVSDVTR.L | | 554.787 | 2 | 1108.566 | 1108.567 | 0 | −0.4 | 3448 | 490.6 | 313.2 | 313.2 | 5.71 |
| 979 | R.LQHVTISQLFAPGDLPELGLEHR.A | | 643.349 | 4 | 2570.374 | 2570.373 | 0 | 0.5 | 3458 | 724.0 | 724.0 | 724.0 | 12.98 |
| 1391 | R.LQHVTISQLFAPGDLPELGLEHRAEDGHEEAMETEASTSGEVAEVA | | 920.150 | 7 | 6435.006 | 6435.004 | 0 | 0.3 | 3458 | 766.0 | 766.0 | 766.0 | 11.88 |
| | EEAMETESSEKVGK.E | | | | | | | | | | | | |
| 979 | R.LQHVTISQLFAPGDLPELGLEHR.A | | 857.462 | 3 | 2570.373 | 2570.373 | 0 | 0.0 | 3458 | 644.7 | 644.7 | 644.7 | 10.98 |
| 1391 | R.LQHVTISQLFAPGDLPELGLEHRAEDGHEEAMETEASTSGEVAEVA | | 920.149 | 7 | 6435.001 | 6435.004 | 0 | −0.5 | 3458 | 778.8 | 778.8 | 778.8 | 10.41 |
| | EEAMETESSEKVGK.E | | | | | | | | | | | | |
| 1391 | R.LQHVTISQLFAPGDLPELGLEHRAEDGHEEAMETEASTSGEVAEVA | | 805.257 | 8 | 6435.004 | 6435.004 | 0 | 0.0 | 3458 | 682.4 | 682.4 | 682.4 | 8.77 |
| | EEAMETESSEKVGK.E | | | | | | | | | | | | |
| 979 | R.LQHVTISQLFAPGDLPELGLEHR.A | | 643.349 | 4 | 2570.375 | 2570.373 | 0 | 0.9 | 3458 | 428.6 | 428.6 | 428.6 | 8.68 |
| 1391 | R.LQHVTISQLFAPGDLPELGLEHRAEDGHEEAMETEASTSGEVAEVA | | 920.293 | 7 | 6436.008 | 6435.004 | 1 | 0.1 | 3458 | 605.4 | 605.4 | 605.4 | 8.28 |
| | EEAMETESSEKVGK.E | | | | | | | | | | | | |
| 1391 | R.LQHVTISQLFAPGDLPELGLEHRAEDGHEEAMETEASTSGEVAEVA | | 920.149 | 7 | 6434.999 | 6435.004 | 0 | 0.8 | 3458 | 632.1 | 632.1 | 632.1 | 7.41 |
| | EEAMETESSEKVGK.E | | | | | | | | | | | | |
| 835 | R.LQHVTISQLFAPGDLPELGLEHRAEDGHEEAMETEASTSGEVAEVA | | 1230.971 | 5 | 6150.825 | 6150.819 | 0 | 1.0 | 3458 | 579.8 | 579.8 | 579.8 | 7.34 |
| | EEAMETESSEK.V | | | | | | | | | | | | |
| 835 | R.LQHVTISQLFAPGDLPELGLEHRAEDGHEEAMETEASTSGEVAEVA | | 1025.975 | 6 | 6150.813 | 6150.819 | 0 | −1.0 | 3458 | 521.1 | 521.1 | 521.1 | 5.84 |
| | EEAMETESSEK.V | | | | | | | | | | | | |
| 835 | R.LQHVTISQLFAPGDLPELGLEHRAEDGHEEAMETEASTSGEVAEVA | | 879.696 | 7 | 6151.826 | 6150.819 | 1 | 0.5 | 3458 | 467.5 | 370.9 | 370.9 | 5.37 |
| | EEAMETESSEK.V | | | | | | | | | | | | |
| 954 | R.AEDGHEEAMETEASTSGEVAEVAEEAMETESSEKVGKETSELGGSD | | 1129.704 | 5 | 5644.488 | 5644.492 | 0 | −0.6 | 3481 | 910.7 | 910.7 | 910.7 | 14.30 |
| | VSILDTTR.L | | | | | | | | | | | | |
| 954 | R.AEDGHEEAMETEASTSGEVAEVAEEAMETESSEKVGKETSELGGSD | | 1129.706 | 5 | 5644.502 | 5644.492 | 0 | 1.8 | 3481 | 736.9 | 736.9 | 736.9 | 10.88 |
| | VSILDTTR.L | | | | | | | | | | | | |
| 954 | R.AEDGHEEAMETEASTSGEVAEVAEEAMETESSEKVGKETSELGGSD | | 1129.705 | 5 | 5644.495 | 5644.492 | 0 | 0.4 | 3481 | 733.2 | 733.2 | 733.2 | 10.88 |
| | VSILDTTR.L | | | | | | | | | | | | |
| 954 | R.AEDGHEEAMETEASTSGEVAEVAEEAMETESSEKVGKETSELGGSD | | 1129.704 | 5 | 5644.490 | 5644.492 | 0 | −0.4 | 3481 | 767.4 | 767.4 | 767.4 | 10.70 |
| | VSILDTTR.L | | | | | | | | | | | | |
| 954 | R.AEDGHEEAMETEASTSGEVAEVAEEAMETESSEKVGKETSELGGSD | | 1129.704 | 5 | 5644.491 | 5644.492 | 0 | −0.2 | 3481 | 727.1 | 727.1 | 727.1 | 10.30 |
| | VSILDTTR.L | | | | | | | | | | | | |
| 948 | R.AEDGHEEAMETEASTSGEVAEVAEEAMETESSEK.V | | 1200.493 | 3 | 3599.465 | 3599.464 | 0 | 0.2 | 3481 | 603.2 | 603.2 | 603.2 | 10.26 |
| 939 | R.AEDGHEEAMETEASTSGEVAEVAEEAMETESSEKVGK.E | | 971.668 | 4 | 3883.649 | 3883.649 | 0 | 0.0 | 3481 | 609.6 | 609.6 | 609.6 | 9.99 |
| 954 | R.AEDGHEEAMETEASTSGEVAEVAEEAMETESSEKVGKETSELGGSD | | 1129.905 | 5 | 5645.497 | 5644.492 | 1 | 0.2 | 3481 | 669.7 | 669.7 | 669.7 | 8.99 |
| | VSILDTTR.L | | | | | | | | | | | | |
| 954 | R.AEDGHEEAMETEASTSGEVAEVAEEAMETESSEKVGKETSELGGSD | | 1129.704 | 5 | 5644.491 | 5644.492 | 0 | −0.1 | 3481 | 633.1 | 633.1 | 633.1 | 8.88 |
| | VSILDTTR.L | | | | | | | | | | | | |
| 954 | R.AEDGHEEAMETEASTSGEVAEVAEEAMETESSEKVGKETSELGGSD | | 1129.704 | 5 | 5644.491 | 5644.492 | 0 | −0.2 | 3481 | 661.0 | 661.0 | 661.0 | 8.70 |
| | VSILDTTR.L | | | | | | | | | | | | |
| 954 | R.AEDGHEEAMETEASTSGEVAEVAEEAMETESSEKVGKETSELGGSD | | 1411.877 | 4 | 5644.488 | 5644.492 | 0 | 0.7 | 3481 | 647.9 | 647.9 | 647.9 | 8.30 |
| | VSILDTTR.L | | | | | | | | | | | | |
| 954 | R.AEDGHEEAMETEASTSGEVAEVAEEAMETESSEKVGKETSELGGSD | | 1130.105 | 5 | 5646.496 | 5644.492 | 2 | −0.4 | 3481 | 628.0 | 628.0 | 628.0 | 8.30 |
| | VSILDTTR.L | | | | | | | | | | | | |
| 954 | R.AEDGHEEAMETEASTSGEVAEVAEEAMETESSEKVGKETSELGGSD | | 1129.704 | 5 | 5644.491 | 5644.492 | 0 | −0.1 | 3481 | 629.8 | 629.8 | 629.8 | 8.28 |
| | VSILDTTR.L | | | | | | | | | | | | |
| 948 | R.AEDGHEEAMETEASTSGEVAEVAEEAMETESSEK.V | | 1200.494 | 3 | 3599.468 | 3599.464 | 0 | 0.9 | 3481 | 559.8 | 559.8 | 559.8 | 7.94 |
| 954 | R.AEDGHEEAMETEASTSGEVAEVAEEAMETESSEKVGKETSELGGSD | | 1129.705 | 5 | 5644.493 | 5644.492 | 0 | 0.2 | 3481 | 588.8 | 588.8 | 588.8 | 7.88 |
| | VSILDTTR.L | | | | | | | | | | | | |
| 954 | R.AEDGHEEAMETEASTSGEVAEVAEEAMETESSEKVGKETSELGGSD | | 1411.878 | 4 | 5644.492 | 5644.492 | 0 | 0.0 | 3481 | 572.3 | 572.3 | 572.3 | 7.88 |
| | VSILDTTR.L | | | | | | | | | | | | |
| 948 | R.AEDGHEEAMETEASTSGEVAEVAEEAMETESSEK.V | | 1201.161 | 3 | 3601.469 | 3599.464 | 2 | 0.7 | 3481 | 565.6 | 503.3 | 503.3 | 7.79 |
| 948 | R.AEDGHEEAMETEASTSGEVAEVAEEAMETESSEK.V | | 1200.492 | 3 | 3599.462 | 3599.464 | 0 | −0.7 | 3481 | 534.9 | 534.9 | 534.9 | 7.06 |
| 948 | R.AEDGHEEAMETEASTSGEVAEVAEEAMETESSEK.V | | 1200.493 | 3 | 3599.463 | 3599.464 | 0 | −0.3 | 3481 | 528.6 | 528.6 | 528.6 | 7.06 |
| 948 | R.AEDGHEEAMETEASTSGEVAEVAEEAMETESSEK.V | | 1201.161 | 3 | 3601.469 | 3599.464 | 2 | −0.5 | 3481 | 490.4 | 490.4 | 490.4 | 6.88 |
| 954 | R.AEDGHEEAMETEASTSGEVAEVAEEAMETESSEKVGKETSELGGSD | | 1130.106 | 5 | 5646.501 | 5644.492 | 2 | 0.3 | 3481 | 562.8 | 562.8 | 562.8 | 6.81 |
| | VSILDTTR.L | | | | | | | | | | | | |
| 948 | R.AEDGHEEAMETEASTSGEVAEVAEEAMETESSEK.V | | 1200.492 | 3 | 3599.462 | 3599.464 | 0 | −0.6 | 3481 | 463.3 | 463.3 | 463.3 | 6.54 |
| 954 | R.AEDGHEEAMETEASTSGEVAEVAEEAMETESSEKVGKETSELGGSD | | 1129.906 | 5 | 5645.499 | 5644.492 | 1 | 0.6 | 3481 | 529.5 | 529.5 | 529.5 | 6.26 |
| | VSILDTTR.L | | | | | | | | | | | | |
| 948 | R.AEDGHEEAMETEASTSGEVAEVAEEAMETESSEK.V | | 1200.491 | 3 | 3599.459 | 3599.464 | 0 | −1.4 | 3481 | 392.4 | 392.4 | 392.4 | 6.00 |
| 954 | R.AEDGHEEAMETEASTSGEVAEVAEEAMETESSEKVGKETSELGGSD | | 1129.704 | 5 | 5644.491 | 5644.492 | 0 | −0.2 | 3481 | 528.2 | 528.2 | 528.2 | 5.97 |
| | VSILDTTR.L | | | | | | | | | | | | |
| 954 | R.AEDGHEEAMETEASTSGEVAEVAEEAMETESSEKVGKETSELGGSD | | 1129.705 | 5 | 5644.497 | 5644.492 | 0 | 0.9 | 3481 | 480.5 | 480.5 | 480.5 | 5.70 |
| | VSILDTTR.L | | | | | | | | | | | | |
| 954 | R.AEDGHEEAMETEASTSGEVAEVAEEAMETESSEKVGKETSELGGSD | | 1129.704 | 5 | 5644.488 | 5644.492 | 0 | −0.6 | 3481 | 528.1 | 528.1 | 528.1 | 5.68 |
| | VSILDTTR.L | | | | | | | | | | | | |
| 954 | R.AEDGHEEAMETEASTSGEVAEVAEEAMETESSEKVGKETSELGGSD | | 941.924 | 6 | 5646.508 | 5644.492 | 2 | 1.7 | 3481 | 529.0 | 529.0 | 529.0 | 5.36 |
| | VSILDTTR.L | | | | | | | | | | | | |
| 954 | R.AEDGHEEAMETEASTSGEVAEVAEEAMETESSEKVGKETSELGGSD | | 941.588 | 6 | 5644.489 | 5644.492 | 0 | −0.5 | 3481 | 548.8 | 548.8 | 548.8 | 4.97 |
| | VSILDTTR.L | | | | | | | | | | | | |
| 954 | R.AEDGHEEAMETEASTSGEVAEVAEEAMETESSEKVGKETSELGGSD | | 941.588 | 6 | 5644.491 | 5644.492 | 0 | −0.2 | 3481 | 496.0 | 496.0 | 496.0 | 4.79 |
| | VSILDTTR.L | | | | | | | | | | | | |
| 954 | R.AEDGHEEAMETEASTSGEVAEVAEEAMETESSEKVGKETSELGGSD | | 941.587 | 6 | 5644.486 | 5644.492 | 0 | −1.0 | 3481 | 491.1 | 491.1 | 491.1 | 4.79 |
| | VSILDTTR.L | | | | | | | | | | | | |
| 954 | R.AEDGHEEAMETEASTSGEVAEVAEEAMETESSEKVGKETSELGGSD | | 1129.704 | 5 | 5644.491 | 5644.492 | 0 | −0.2 | 3481 | 390.8 | 390.8 | 390.8 | 4.32 |
| | VSILDTTR.L | | | | | | | | | | | | |
| 954 | R.AEDGHEEAMETEASTSGEVAEVAEEAMETESSEKVGKETSELGGSD | | 1129.704 | 5 | 5644.488 | 5644.492 | 0 | −0.6 | 3481 | 363.7 | 363.7 | 363.7 | 4.28 |
| | VSILDTTR.L | | | | | | | | | | | | |
| 954 | R.AEDGHEEAMETEASTSGEVAEVAEEAMETESSEKVGKETSELGGSD | | 1129.706 | 5 | 5644.502 | 5644.492 | 0 | 1.7 | 3481 | 348.3 | 348.3 | 348.3 | 3.58 |
| | VSILDTTR.L | | | | | | | | | | | | |
| 948 | R.AEDGHEEAMETEASTSGEVAEVAEEAMETESSEK.V | | 900.621 | 4 | 3599.463 | 3599.464 | 0 | 0.2 | 3481 | 304.0 | 304.0 | 304.0 | 3.58 |
| 988 | K.VGKETSELGGSDVSILDTTR.L | | 1032.526 | 2 | 2064.045 | 2064.046 | 0 | −0.2 | 3515 | 631.2 | 631.2 | 631.2 | 10.70 |
| 988 | K.VGKETSELGGSDVSILDTTR.L | | 688.687 | 3 | 2064.046 | 2064.046 | 0 | 0.1 | 3515 | 515.2 | 515.2 | 515.2 | 8.79 |
| 827 | K.ETSELGGSDVSILDTTR.L | | 890.434 | 2 | 1779.861 | 1779.861 | 0 | 0.1 | 3518 | 718.0 | 718.0 | 718.0 | 12.98 |
| 827 | K.ETSELGGSDVSILDTTR.L | | 890.433 | 2 | 1779.860 | 1779.861 | 0 | −0.6 | 3518 | 724.1 | 724.1 | 724.1 | 12.39 |
| 827 | K.ETSELGGSDVSILDTTR.L | | 890.433 | 2 | 1779.860 | 1779.861 | 0 | −0.6 | 3518 | 570.3 | 570.3 | 570.3 | 9.39 |
| 1679 | R.SC[+57.021]VQSAVGMLRDQNESC[+57.021]TR.N | C[+57]* | 733.330 | 3 | 2197.976 | 2197.975 | 0 | 0.7 | 3538 | 546.8 | 546.8 | 546.8 | 8.97 |
| | | 2 | | | | | | | | | | | |
| 1713 | R.SC[+57.021]VQSAVGMLR.D | C[+57] | 604.300 | 2 | 1207.592 | 1207.592 | 0 | −0.1 | 3538 | 513.6 | 417.4 | 417.4 | 8.21 |
| 1679 | R.SC[+57.021]VQSAVGMLRDQNESC[+57.021]TR.N | C[+57]* | 733.330 | 3 | 2197.976 | 2197.975 | 0 | 0.4 | 3538 | 498.0 | 498.0 | 498.0 | 8.20 |
| | | 2 | | | | | | | | | | | |
| 1713 | R.SC[+57.021]VQSAVGMLR.D | C[+57] | 604.299 | 2 | 1207.592 | 1207.592 | 0 | −0.5 | 3538 | 506.2 | 506.2 | 506.2 | 7.62 |
| 1727 | R.VVLLLGLLNEDDAC[+57.021]HASFLR.V | C[+57] | 752.400 | 3 | 2255.187 | 2255.185 | 0 | 0.6 | 3561 | 595.1 | 595.1 | 595.1 | 9.98 |
| 828 | R.LSVFLKKQEESQFHPLEWLAR.E | | 647.103 | 4 | 2585.390 | 2585.388 | 0 | 0.8 | 3586 | 394.4 | 382.0 | 382.0 | 6.87 |
| 828 | R.LSVFLKKQEESQFHPLEWLAR.E | | 517.883 | 5 | 2585.388 | 2585.388 | 0 | 0.1 | 3586 | 327.0 | 327.0 | 327.0 | 5.55 |
| 1038 | K.KQEESQFHPLEWLAR.E | | 475.245 | 4 | 1897.956 | 1897.956 | 0 | 0.5 | 3592 | 388.0 | 388.0 | 388.0 | 7.42 |
| 1038 | K.KQEESQFHPLEWLAR.E | | 475.244 | 4 | 1897.956 | 1897.956 | 0 | 0.2 | 3592 | 347.2 | 347.2 | 347.2 | 5.91 |
| 1038 | K.KQEESQFHPLEWLAR.E | | 475.244 | 4 | 1897.956 | 1897.956 | 0 | 0.2 | 3592 | 326.9 | 326.9 | 326.9 | 5.91 |
| 859 | K.QEESQFHPLEWLAR.E | | 590.625 | 3 | 1769.861 | 1769.861 | 0 | 0.0 | 3593 | 547.7 | 547.7 | 547.7 | 8.98 |
| 859 | K.QEESQFHPLEWLAR.E | | 885.434 | 2 | 1769.860 | 1769.861 | 0 | −0.1 | 3593 | 498.3 | 498.3 | 498.3 | 8.80 |
| 1739 | R.EAC[+57.021]NQDALQEAGTFR.H | C[+57] | 855.381 | 2 | 1709.754 | 1709.755 | 0 | −0.4 | 3607 | 673.6 | 673.6 | 673.6 | 11.13 |
| 2234 | R.VQGAVTPLLASMISFIDR.D | | 640.021 | 3 | 1918.048 | 1918.047 | 0 | 0.8 | 3628 | 423.6 | 423.6 | 423.6 | 7.57 |
| 1524 | R.DGNLELLT[+79.966]RPDTPPWARDLWM[+15.995]FIFS | M[+16], | 821.054 | 6 | 4921.289 | 4920.300 | 1 | 2.9 | 3646 | 374.6 | 241.2 | 15.8 | 2.64 |
| | [+79.966]DTMLLNIPLVMNNER.H | S[+80], | | | | | | | | | | | |
| | | T[+80] | | | | | | | | | | | |
| 1094 | K.IKDYLEELWVQAQYITDAEGLPKK.F | | 713.379 | 4 | 2850.495 | 2850.492 | 0 | 0.8 | 3715 | 677.8 | 677.8 | 677.8 | 11.36 |
| 1214 | K.IKDYLEELWVQAQYITDAEGLPK.K | | 908.479 | 3 | 2723.421 | 2722.397 | 1 | 7.5 | 3715 | 442.7 | 442.7 | 442.7 | 6.19 |
| 1856 | K.KFVDIFQQTPLGR.F | | 774.930 | 2 | 1548.853 | 1548.853 | 0 | 0.5 | 3738 | 542.6 | 542.6 | 542.6 | 8.40 |
| 1856 | K.KFVDIFQQTPLGR.F | | 516.956 | 3 | 1548.853 | 1548.853 | 0 | 0.4 | 3738 | 407.3 | 407.3 | 407.3 | 6.76 |
| 1856 | K.KFVDIFQQTPLGR.F | | 516.956 | 3 | 1548.853 | 1548.853 | 0 | 0.3 | 3738 | 318.6 | 318.6 | 318.6 | 5.04 |
| 1379 | R.KLKAASEAPEEEVSLPWVHLAYQR.F | | 688.617 | 4 | 2751.445 | 2751.446 | 0 | 0.6 | 3797 | 683.9 | 683.9 | 683.9 | 11.12 |
| 1379 | R.KLKAASEAPEEEVSLPWVHLAYQR.F | | 688.618 | 4 | 2751.448 | 2751.446 | 0 | 0.6 | 3797 | 574.5 | 574.5 | 574.5 | 9.70 |
| 1167 | K.LKAASEAPEEEVSLPWVHLAYQR.F | | 656.594 | 4 | 2623.352 | 2623.352 | 0 | 0.3 | 3798 | 607.0 | 607.0 | 607.0 | 10.70 |
| 1167 | K.LKAASEAPEEEVSLPWVHLAYQR.F | | 875.122 | 3 | 2623.353 | 2623.352 | 0 | 0.4 | 3798 | 569.4 | 569.4 | 569.4 | 9.11 |
| 1167 | K.LKAASEAPEEEVSLPWVHLAYQR.F | | 875.122 | 3 | 2623.351 | 2623.352 | 0 | −0.3 | 3798 | 545.0 | 545.0 | 545.0 | 8.39 |
| 1167 | K.LKAASEAPEEEVSLPWVHLAYQR.F | | 525.476 | 5 | 2623.351 | 2623.352 | 0 | −0.4 | 3798 | 530.1 | 521.1 | 521.1 | 7.87 |
| 1273 | K.AASEAPEEEVSLPWVHLAYQR.F | | 794.729 | 3 | 2382.172 | 2382.173 | 0 | 0.0 | 3800 | 801.8 | 801.8 | 801.8 | 14.95 |
| 1273 | K.AASEAPEEEVSLPWVHLAYQR.F | | 1191.590 | 2 | 2382.172 | 2382.173 | 0 | −0.3 | 3800 | 604.0 | 604.0 | 604.0 | 10.39 |
| 947 | R.ILTIYPQVLHSLMEAR.W | | 942.525 | 2 | 1884.042 | 1884.041 | 0 | 0.4 | 3831 | 559.1 | 523.2 | 523.2 | 8.98 |
| 947 | R.ILTIYPQVLHSLMEAR.W | | 628.686 | 3 | 1884.043 | 1884.041 | 0 | 0.7 | 3831 | 507.5 | 507.5 | 507.5 | 8.80 |
| 1588 | R.ILTIYPQVLHSLM[+15.995]EAR.W | M[+16] | 634.017 | 3 | 1900.037 | 1900.036 | 0 | 0.7 | 3831 | 465.8 | 465.8 | 465.8 | 8.65 |
| 947 | R.ILTIYPQVLHSLMEAR.W | | 628.686 | 3 | 1884.043 | 1884.041 | 0 | 0.7 | 3831 | 379.1 | 379.1 | 379.1 | 8.30 |
| 1588 | R.ILTIYPQVLHSLM[+15.995]EAR.W | M[+16] | 634.017 | 3 | 1900.037 | 1900.036 | 0 | 0.7 | 3831 | 391.3 | 391.3 | 391.3 | 7.71 |
| 947 | R.ILTIYPQVLHSLMEAR.W | | 628.686 | 3 | 1884.042 | 1884.041 | 0 | 0.6 | 3831 | 351.1 | 351.1 | 351.1 | 6.38 |
| 992 | R.NTLKPSPQAWLQLVK.N | | 575.002 | 3 | 1722.990 | 1722.990 | 0 | 0.2 | 3873 | 648.6 | 648.6 | 648.6 | 10.72 |
| 992 | R.NTLKPSPQAWLQLVK.N | | 575.002 | 3 | 1722.990 | 1722.990 | 0 | 0.1 | 3873 | 604.0 | 604.0 | 604.0 | 10.72 |
| 992 | R.NTLKPSPQAWLQLVK.N | | 861.998 | 2 | 1722.989 | 1722.990 | 0 | −0.7 | 3873 | 495.4 | 495.4 | 495.4 | 8.22 |
| 992 | R.NTLKPSPQAWLQLVK.N | | 575.335 | 3 | 1723.992 | 1722.990 | 1 | −1.0 | 3873 | 473.0 | 473.0 | 473.0 | 7.47 |
| 992 | R.NTLKPSPQAWLQLVK.N | | 575.001 | 3 | 1722.989 | 1722.990 | 0 | −0.5 | 3873 | 416.2 | 416.2 | 416.2 | 6.95 |
| 992 | R.NTLKPSPQAWLQLVK.N | | 431.503 | 4 | 1722.990 | 1722.990 | 0 | 0.0 | 3873 | 307.3 | 307.3 | 307.3 | 5.11 |
| 2814 | R.IFSTALFVEHVLLGTESR.V | | 673.702 | 3 | 2019.092 | 2019.091 | 0 | 0.7 | 3923 | 597.4 | 597.4 | 597.4 | 9.98 |
| 1047 | R.VPELQGLVTEHVFLLDK.C | | 646.363 | 3 | 1937.075 | 1937.074 | 0 | 0.2 | 3941 | 466.1 | 466.1 | 466.1 | 8.91 |
| 1047 | R.VPELQGLVTEHVFLLDK.C | | 646.364 | 3 | 1937.077 | 1937.074 | 0 | 1.2 | 3941 | 336.7 | 336.7 | 336.7 | 6.17 |
| 1090 | R.ENSDVKTHGPFEAVMR.T | | 606.293 | 3 | 1816.864 | 1816.865 | 0 | 0.3 | 3961 | 618.8 | 618.8 | 618.8 | 9.86 |
| 1090 | R.ENSDVKTHGPFEAVMR.T | | 606.293 | 3 | 1816.864 | 1816.865 | 0 | 0.3 | 3961 | 579.2 | 579.2 | 579.2 | 8.86 |
| 1090 | R.ENSDVKTHGPFEAVMR.T | | 606.293 | 3 | 1816.864 | 1816.865 | 0 | 0.5 | 3961 | 568.5 | 568.5 | 568.5 | 8.86 |
| 1090 | R.ENSDVKTHGPFEAVMR.T | | 454.972 | 4 | 1816.865 | 1816.865 | 0 | 0.0 | 3961 | 413.1 | 413.1 | 413.1 | 7.26 |
| 1090 | R.ENSDVKTHGPFEAVMR.T | | 454.972 | 4 | 1816.865 | 1816.865 | 0 | −0.1 | 3961 | 394.2 | 394.2 | 394.2 | 6.96 |
| 1090 | R.ENSDVKTHGPFEAVMR.T | | 909.437 | 2 | 1817.867 | 1816.865 | 1 | −0.4 | 3961 | 479.6 | 479.6 | 479.6 | 6.37 |
| 1090 | R.ENSDVKTHGPFEAVMR.T | | 454.972 | 4 | 1816.865 | 1816.865 | 0 | 0.2 | 3961 | 332.7 | 332.7 | 332.7 | 5.63 |
| 825 | K.THGPFEAVMR.T | | 572.782 | 2 | 1144.557 | 1144.557 | 0 | 0.1 | 3967 | 545.6 | 545.6 | 545.6 | 8.39 |
| 825 | K.THGPFEAVMR.T | | 572.782 | 2 | 1144.557 | 1144.557 | 0 | 0.1 | 3967 | 509.8 | 509.8 | 509.8 | 7.92 |
| 825 | K.THGPFEAVMR.T | | 572.782 | 2 | 1144.557 | 1144.557 | 0 | −0.1 | 3967 | 479.5 | 479.5 | 479.5 | 7.76 |
| 825 | K.THGPFEAVMR.T | | 572.782 | 2 | 1144.557 | 1144.557 | 0 | 0.2 | 3967 | 476.3 | 476.3 | 476.3 | 7.18 |
| 825 | K.THGPFEAVMR.T | | 572.783 | 2 | 1144.560 | 1144.557 | 0 | 2.4 | 3967 | 415.9 | 415.9 | 415.9 | 5.94 |
| 1681 | R.AWFASEQMIC[+57.021]PYC[+57.021]LTALPDEFSPAVSQA | C[+57]* | 1161.538 | 3 | 3482.599 | 3482.597 | 0 | 0.7 | 4023 | 739.9 | 739.9 | 739.9 | 12.26 |
| | HR.E | 2 | | | | | | | | | | | |
| 1681 | R.AWFASEQMIC[+57.021]PYC[+57.021]LTALPDEFSPAVSQA | C[+57]* | 871.405 | 4 | 3482.599 | 3482.597 | 0 | 0.7 | 4023 | 566.5 | 541.5 | 541.5 | 7.86 |
| | HR.E | 2 | | | | | | | | | | | |
| 856 | K.DNAPPEKEVIESLLSLLFVQK.G | | 790.438 | 3 | 2369.298 | 2369.296 | 0 | 0.9 | 4080 | 545.9 | 545.9 | 545.9 | 8.97 |
| 856 | K.DNAPPEKEVIESLLSLLFVQK.G | | 593.080 | 4 | 2369.297 | 2369.296 | 0 | 0.4 | 4080 | 406.6 | 406.6 | 406.6 | 7.30 |
| 2072 | K.SLSPFNDVVDKTPVIR.S | | 893.988 | 2 | 1786.969 | 1786.970 | 0 | 0.2 | 4116 | 384.3 | 384.3 | 384.3 | 6.85 |
| 2072 | K.SLSPFNDVVDKTPVIR.S | | 893.988 | 2 | 1786.969 | 1786.970 | 0 | 0.3 | 4116 | 388.5 | 388.5 | 388.5 | 6.56 |
| 1780 | K.AFITEDK.T | | 412.210 | 2 | 823.413 | 823.420 | 0 | −7.9 | 4161 | 325.8 | 325.8 | 325.8 | 4.05 |
| 1780 | K.AFITEDK.T | | 412.210 | 2 | 823.413 | 823.420 | 0 | 7.5 | 4161 | 302.6 | 302.6 | 302.6 | 3.77 |
| 1408 | K.TSAYSRNDELNHLEEEGR.F | | 707.326 | 3 | 2119.964 | 2119.964 | 0 | −0.1 | 4186 | 732.9 | 732.9 | 732.9 | 12.70 |
| 936 | K.TSAYSRNDELNHLEEEGRFLK.A | | 627.808 | 4 | 2508.211 | 2508.211 | 0 | 0.1 | 4186 | 473.4 | 473.4 | 473.4 | 8.29 |
| 936 | K.TSAYSRNDELNHLEEEGRFLK.A | | 502.448 | 5 | 2508.212 | 2508.211 | 0 | 0.1 | 4186 | 414.7 | 414.7 | 414.7 | 8.06 |
| 1408 | K.TSAYSRNDELNHLEEEGR.F | | 530.746 | 4 | 2119.964 | 2119.964 | 0 | 0.1 | 4186 | 380.9 | 380.9 | 380.9 | 7.70 |
| 936 | K.TSAYSRNDELNHLEEEGRFLK.A | | 502.649 | 5 | 2509.215 | 2508.211 | 1 | 0.0 | 4186 | 373.7 | 373.7 | 94.8 | 7.06 |
| 1408 | K.TSAYSRNDELNHLEEEGR.F | | 1060.484 | 2 | 2119.961 | 2119.964 | 0 | −1.6 | 4186 | 397.7 | 397.7 | 397.7 | 6.29 |
| 1408 | K.TSAYSRNDELNHLEEEGR.F | | 530.746 | 4 | 2119.964 | 2119.964 | 0 | 0.1 | 4186 | 351.9 | 351.9 | 351.9 | 6.08 |
| 936 | K.TSAYSRNDELNHLEEEGRFLK.A | | 836.742 | 3 | 2508.210 | 2508.211 | 0 | 0.4 | 4186 | 420.2 | 420.2 | 420.2 | 5.17 |
| 1482 | K.TSAYSRNDELN[+0.984]HLEEEGRFLK.A | N[+1] | 502.645 | 5 | 2509.197 | 2509.195 | 0 | 0.6 | 4186 | 311.4 | 311.4 | 20.7 | 5.07 |
| 807 | R.NDELNHLEEEGR.F | | 727.829 | 2 | 1454.651 | 1454.651 | 0 | 0.2 | 4192 | 792.6 | 792.6 | 792.6 | 13.72 |
| 1494 | R.N[+0.984]DELNHLEEEGRFLK.A | N[+1] | 615.299 | 3 | 1843.883 | 1843.882 | 0 | 0.3 | 4192 | 686.1 | 686.1 | 277.8 | 11.44 |
| 978 | R.NDELNHLEEEGRFLK.A | | 614.971 | 3 | 1842.898 | 1842.898 | 0 | −0.1 | 4192 | 574.6 | 574.6 | 574.6 | 9.44 |
| 978 | R.NDELNHLEEEGRFLK.A | | 614.971 | 3 | 1842.899 | 1842.898 | 0 | 0.6 | 4192 | 530.5 | 530.5 | 530.5 | 8.71 |
| 807 | R.NDELNHLEEEGR.F | | 485.555 | 3 | 1454.651 | 1454.651 | 0 | 0.1 | 4192 | 462.1 | 462.1 | 462.1 | 8.65 |
| 978 | R.NDELNHLEEEGRFLK.A | | 461.480 | 4 | 1842.898 | 1842.898 | 0 | 0.1 | 4192 | 448.2 | 448.2 | 448.2 | 8.38 |
| 1496 | R.NDELN[+0.984]HLEEEGR.F | N[+1] | 485.883 | 3 | 1455.635 | 1455.635 | 0 | 0.0 | 4192 | 492.5 | 397.2 | 341.1 | 8.21 |
| 978 | R.NDELNHLEEEGRFLK.A | | 461.480 | 4 | 1842.898 | 1842.898 | 0 | 0.1 | 4192 | 489.2 | 475.8 | 475.8 | 7.94 |
| 1488 | R.NDELN[+0.984]HLEEEGRFLK.A | N[+1] | 461.726 | 4 | 1843.882 | 1843.882 | 0 | 0.3 | 4192 | 479.5 | 467.9 | 169.7 | 7.79 |
| 978 | R.NDELNHLEEEGRFLK.A | | 614.971 | 3 | 1842.898 | 1842.898 | 0 | −0.2 | 4192 | 479.5 | 479.5 | 479.5 | 7.78 |
| 1488 | R.NDELN[+0.984]HLEEEGRFLK.A | N[+1] | 615.299 | 3 | 1843.882 | 1843.882 | 0 | 0.0 | 4192 | 471.6 | 471.6 | 228.4 | 7.78 |
| 1494 | R.N[+0.984]DELNHLEEEGRFLK.A | N[+1] | 461.726 | 4 | 1843.882 | 1843.882 | 0 | 0.1 | 4192 | 444.8 | 444.8 | 104.1 | 7.78 |
| 807 | R.NDELNHLEEEGR.F | | 485.555 | 3 | 1454.650 | 1454.651 | 0 | 0.3 | 4192 | 506.9 | 506.9 | 506.9 | 7.62 |
| 1496 | R.NDELN[+0.984]HLEEEGR.F | N[+1] | 485.883 | 3 | 1455.634 | 1455.635 | 0 | −0.3 | 4192 | 474.5 | 372.7 | 305.1 | 7.47 |
| 807 | R.NDELNHLEEEGR.F | | 727.829 | 2 | 1454.650 | 1454.651 | 0 | 0.3 | 4192 | 471.9 | 471.9 | 471.9 | 7.47 |
| 978 | R.NDELNHLEEEGRFLK.A | | 614.971 | 3 | 1842.898 | 1842.898 | 0 | 0.3 | 4192 | 506.5 | 506.5 | 506.5 | 7.35 |
| 978 | R.NDELNHLEEEGRFLK.A | | 461.731 | 4 | 1843.903 | 1842.898 | 1 | 0.6 | 4192 | 409.5 | 409.5 | 409.5 | 7.26 |
| 1488 | R.NDELN[+0.984]HLEEEGRFLK.A | N[+1] | 461.726 | 4 | 1843.882 | 1843.882 | 0 | 0.1 | 4192 | 382.5 | 382.5 | 100.9 | 7.14 |
| 978 | R.NDELNHLEEEGRFLK.A | | 461.480 | 4 | 1842.898 | 1842.898 | 0 | 0.3 | 4192 | 438.5 | 438.5 | 438.5 | 6.68 |
| 978 | R.NDELNHLEEEGRFLK.A | | 921.953 | 2 | 1842.898 | 1842.898 | 0 | 0.0 | 4192 | 439.1 | 439.1 | 439.1 | 6.13 |
| 1496 | R.NDELN[+0.984]HLEEEGR.F | N[+1] | 728.822 | 2 | 1456.637 | 1455.635 | 1 | 0.7 | 4192 | 447.8 | 447.8 | 151.5 | 5.31 |
| 2409 | R.FLKAYSPASR.G | | 570.314 | 2 | 1139.621 | 1139.621 | 0 | 0.2 | 4204 | 498.1 | 498.1 | 498.1 | 7.64 |
| 831 | R.GREPANEASVEYLQEVAR.I | | 673.336 | 3 | 2017.994 | 2017.994 | 0 | 0.1 | 4214 | 495.9 | 495.9 | 495.9 | 8.79 |
| 831 | R.GREPANEASVEYLQEVAR.I | | 1009.500 | 2 | 2017.993 | 2017.994 | 0 | 0.2 | 4214 | 401.8 | 401.8 | 401.8 | 7.81 |
| 831 | R.GREPANEASVEYLQEVAR.I | | 673.336 | 3 | 2017.993 | 2017.994 | 0 | −0.3 | 4214 | 493.5 | 493.5 | 493.5 | 7.61 |
| 831 | R.GREPANEASVEYLQEVAR.I | | 1009.501 | 2 | 2017.995 | 2017.994 | 0 | 0.6 | 4214 | 416.7 | 416.7 | 416.7 | 7.52 |
| 831 | R.GREPANEASVEYLQEVAR.I | | 1009.500 | 2 | 2017.993 | 2017.994 | 0 | −0.5 | 4214 | 386.6 | 386.6 | 386.6 | 7.11 |
| 831 | R.GREPANEASVEYLQEVAR.I | | 673.336 | 3 | 2017.995 | 2017.994 | 0 | 0.4 | 4214 | 342.0 | 342.0 | 342.0 | 5.89 |
| 831 | R.GREPANEASVEYLQEVAR.I | | 673.336 | 3 | 2017.994 | 2017.994 | 0 | 0.2 | 4214 | 339.0 | 339.0 | 339.0 | 5.89 |
| 1696 | R.IRLC[+57.021]LDR.A | C[+57] | 473.268 | 2 | 945.530 | 945.530 | 0 | −0.4 | 4232 | 381.3 | 381.3 | 381.3 | 5.85 |
| 1624 | R.AADFLSEPEGGPEM[+15.995]AKEK.Q | M[+16] | 641.300 | 3 | 1921.885 | 1921.885 | 0 0 | 0.2 | 4239 | 650.9 | 650.9 | 650.9 | 11.70 |
| 1232 | R.AADFLSEPEGGPEMAKEK.Q | | 635.968 | 3 | 1905.891 | 1905.890 | 0 | 0.4 | 4239 | 609.0 | 609.0 | 609.0 | 10.70 |
| 929 | R.AADFLSEPEGGPEMAK.E | | 824.880 | 2 | 1648.752 | 1648.752 | 0 | −0.3 | 4239 | 614.2 | 614.2 | 614.2 | 10.13 |
| 929 | R.AADFLSEPEGGPEMAK.E | | 824.880 | 2 | 1648.753 | 1648.752 | 0 | 0.1 | 4239 | 590.6 | 590.6 | 590.6 | 9.72 |
| 1232 | R.AADFLSEPEGGPEMAKEK.Q | | 635.969 | 3 | 1905.892 | 1905.890 | 0 | 0.9 | 4239 | 594.7 | 594.7 | 594.7 | 9.70 |
| 929 | R.AADFLSEPEGGPEMAK.E | | 824.880 | 2 | 1648.753 | 1648.752 | 0 | 0.6 | 4239 | 512.1 | 512.1 | 512.1 | 8.80 |
| 1618 | R.AADFLSEPEGGPEM[+15.995]AK.E | M[+16] | 832.878 | 2 | 1664.748 | 1664.747 | 0 | 0.3 | 4239 | 498.2 | 498.2 | 498.2 | 8.80 |
| 1232 | R.AADFLSEPEGGPEMAKEK.Q | | 953.449 | 2 | 1905.891 | 1905.890 | 0 | 0.3 | 4239 | 516.2 | 516.2 | 516.2 | 8.79 |
| 929 | R.AADFLSEPEGGPEMAK.E | | 824.880 | 2 | 1648.753 | 1648.752 | 0 | 0.3 | 4239 | 455.2 | 455.2 | 455.2 | 8.65 |
| 929 | R.AADFLSEPEGGPEMAK.E | | 550.256 | 3 | 1648.752 | 1648.752 | 0 | −0.1 | 4239 | 536.6 | 536.6 | 536.6 | 8.47 |
| 1624 | R.AADFLSEPEGGPEM[+15.995]AKEK.Q | M[+16] | 961.445 | 2 | 1921.883 | 1921.885 | 0 | 0.8 | 4239 | 540.3 | 540.3 | 540.3 | 8.39 |
| 929 | R.AADFLSEPEGGPEMAK.E | | 824.880 | 2 | 1648.753 | 1648.752 | 0 | 0.6 | 4239 | 507.7 | 507.7 | 507.7 | 8.21 |
| 1232 | R.AADFLSEPEGGPEMAKEK.Q | | 477.228 | 4 | 1905.889 | 1905.890 | 0 | −0.5 | 4239 | 536.7 | 536.7 | 536.7 | 7.87 |
| 1036 | R.GMEFVQGLSKPGRPHQWVFPK.D | | 809.092 | 3 | 2425.261 | 2425.260 | 0 | 0.4 | 4288 | 649.6 | 649.6 | 649.6 | 9.56 |
| 1036 | R.GMEFVQGLSKPGRPHQWVFPK.D | | 607.071 | 4 | 2425.260 | 2425.260 | 0 | 0.1 | 4288 | 495.2 | 495.2 | 495.2 | 9.07 |
| 1036 | R.GMEFVQGLSKPGRPHQWVFPK.D | | 607.070 | 4 | 2425.260 | 2425.260 | 0 | 0.0 | 4288 | 398.9 | 398.9 | 398.9 | 8.56 |
| 1036 | R.GMEFVQGLSKPGRPHQWVFPK.D | | 607.070 | 4 | 2425.259 | 2425.260 | 0 | 0.2 | 4288 | 370.6 | 370.6 | 370.6 | 7.97 |
| 1036 | R.GMEFVQGLSKPGRPHQWVFPK.D | | 809.426 | 3 | 2426.263 | 2425.260 | 1 | −0.1 | 4288 | 552.1 | 552.1 | 552.1 | 7.83 |
| 1551 | R.GM[+15.995]EFVQGLSKPGRPHQWVFPK.D | M[+16] | 489.057 | 5 | 2441.256 | 2441.255 | 0 | 0.3 | 4288 | 378.4 | 361.5 | 361.5 | 7.68 |
| 1551 | R.GM[+15.995]EFVQGLSKPGRPHQWVFPK.D | M[+16] | 814.423 | 3 | 2441.255 | 2441.255 | 0 | 0.3 | 4288 | 511.4 | 511.4 | 511.4 | 7.65 |
| 1036 | R.GMEFVQGLSKPGRPHQWVFPK.D | | 809.091 | 3 | 2425.257 | 2425.260 | 0 | 1.0 | 4288 | 547.1 | 547.1 | 547.1 | 7.24 |
| 1036 | R.GMEFVQGLSKPGRPHQWVFPK.D | | 485.858 | 5 | 2425.261 | 2425.260 | 0 | 0.5 | 4288 | 345.9 | 345.9 | 345.9 | 7.24 |
| 1551 | R.GM[+15.995]EFVQGLSKPGRPHQWVFPK.D | M[+16] | 489.057 | 5 | 2441.255 | 2441.255 | 0 | 0.0 | 4288 | 338.5 | 338.5 | 338.5 | 6.65 |
| 1036 | R.GMEFVQGLSKPGRPHQWVFPK.D | | 486.054 | 5 | 2426.242 | 2425.260 | 1 | −8.5 | 4288 | 334.7 | 334.7 | 334.7 | 4.60 |
| 1058 | K.DVVKQQGLRQDHPGQMDR.Y | | 703.021 | 3 | 2107.047 | 2107.046 | 0 | 0.4 | 4309 | 600.9 | 600.9 | 600.9 | 8.94 |
| 1058 | K.DVVKQQGLRQDHPGQMDR.Y | | 527.517 | 4 | 2107.047 | 2107.046 | 0 | 0.6 | 4309 | 371.0 | 371.0 | 371.0 | 7.06 |
| 1058 | K.DVVKQQGLRQDHPGQMDR.Y | | 422.215 | 5 | 2107.048 | 2107.046 | 0 | 0.7 | 4309 | 351.0 | 351.0 | 351.0 | 5.73 |
| 1527 | K.DVVKQQGLRQDHPGQM[+15.995]DR.Y | M[+16] | 531.516 | 4 | 2123.042 | 2123.041 | 0 | 0.4 | 4309 | 324.5 | 324.5 | 324.5 | 5.55 |
| 1527 | K.DVVKQQGLRQDHPGQM[+15.995]DR.Y | M[+16] | 531.516 | 4 | 2123.041 | 2123.041 | 0 | 0.1 | 4309 | 317.5 | 291.9 | 291.9 | 5.26 |
| 1527 | K.DVVKQQGLRQDHPGQM[+15.995]DR.Y | M[+16] | 531.516 | 4 | 2123.042 | 2123.041 | 0 | 0.3 | 4309 | 310.7 | 310.7 | 310.7 | 5.26 |
| 1880 | K.QQGLRQDHPGQMDRYLVYGDEYK.A | | 699.834 | 4 | 2796.316 | 2796.316 | 0 | 0.1 | 4313 | 437.1 | 437.1 | 437.1 | 7.17 |
| 1880 | K.QQGLRQDHPGQMDRYLVYGDEYK.A | | 560.069 | 5 | 2796.315 | 2796.316 | 0 | −0.2 | 4313 | 393.2 | 393.2 | 393.2 | 7.06 |
| 1880 | K.QQGLRQDHPGQMDRYLVYGDEYK.A | | 932.777 | 3 | 2796.317 | 2796.316 | 0 | 0.2 | 4313 | 480.2 | 480.2 | 480.2 | 7.02 |
| 1880 | K.QQGLRQDHPGQMDRYLVYGDEYK.A | | 560.069 | 5 | 2796.316 | 2796.316 | 0 | −0.1 | 4313 | 326.0 | 326.0 | 326.0 | 5.73 |
| 1544 | K.QQGLRQDHPGQM[+15.995]DRYLVYGDEYK.A | M[+16] | 704.084 | 4 | 2813.316 | 2812.311 | 1 | 0.6 | 4313 | 311.4 | 311.4 | 311.4 | 5.26 |
| 1544 | K.QQGLRQDHPGQM[+15.995]DRYLVYGDEYK.A | M[+16] | 563.268 | 5 | 2812.310 | 2812.311 | 0 | −0.2 | 4313 | 300.3 | 300.3 | 300.3 | 5.07 |
| 1880 | K.QQGLRQDHPGQMDRYLVYGDEYK.A | | 699.834 | 4 | 2796.315 | 2796.316 | 0 | −0.2 | 4313 | 332.9 | 332.9 | 332.9 | 4.96 |
| 1880 | K.QQGLRQDHPGQMDRYLVYGDEYK.A | | 932.778 | 3 | 2796.319 | 2796.316 | 0 | 1.0 | 4313 | 314.5 | 314.5 | 314.5 | 3.65 |
| 816 | R.QDHPGQMDRYLVYGDEYK.A | | 738.669 | 3 | 2213.993 | 2213.992 | 0 | 0.5 | 4318 | 388.7 | 388.7 | 388.7 | 7.22 |
| 816 | R.QDHPGQMDRYLVYGDEYK.A | | 554.253 | 4 | 2213.991 | 2213.992 | 0 | 0.6 | 4318 | 423.7 | 423.7 | 423.7 | 6.94 |
| 844 | R.YLVYGDEYKALR.D | | 745.388 | 2 | 1489.769 | 1489.769 | 0 | 0.2 | 4327 | 603.8 | 603.8 | 603.8 | 10.44 |
| 970 | R.YLVYGDEYKALRDAVAK.A | | 658.683 | 3 | 1974.034 | 1974.033 | 0 | 0.3 | 4327 | 416.7 | 416.7 | 416.7 | 7.47 |
| 970 | R.YLVYGDEYKALRDAVAK.A | | 494.264 | 4 | 1974.033 | 1974.033 | 0 | 0.2 | 4327 | 412.2 | 412.2 | 412.2 | 7.47 |
| 970 | R.YLVYGDEYKALRDAVAK.A | | 658.683 | 3 | 1974.033 | 1974.033 | 0 | 0.0 | 4327 | 441.7 | 441.7 | 441.7 | 7.40 |
| 1785 | R.YLVYGDEYK.A | | 575.277 | 2 | 1149.546 | 1149.546 | 0 | 0.1 | 4327 | 438.0 | 438.0 | 438.0 | 7.35 |
| 970 | R.YLVYGDEYKALRDAVAK.A | | 494.264 | 4 | 1974.033 | 1974.033 | 0 | 0.2 | 4327 | 383.3 | 383.3 | 383.3 | 7.35 |
| 970 | R.YLVYGDEYKALRDAVAK.A | | 494.264 | 4 | 1974.035 | 1974.033 | 0 | 0.8 | 4327 | 364.9 | 364.9 | 364.9 | 7.35 |
| 1785 | R.YLVYGDEYK.A | | 575.277 | 2 | 1149.546 | 1149.546 | 0 | 0.5 | 4327 | 478.4 | 478.4 | 478.4 | 7.18 |
| 1785 | R.YLVYGDEYK.A | | 575.277 | 2 | 1149.546 | 1149.546 | 0 | −0.5 | 4327 | 455.2 | 455.2 | 455.2 | 7.18 |
| 970 | R.YLVYGDEYKALRDAVAK.A | | 658.683 | 3 | 1974.033 | 1974.033 | 0 | 0.0 | 4327 | 369.4 | 369.4 | 369.4 | 7.06 |
| 970 | R.YLVYGDEYKALRDAVAK.A | | 987.521 | 2 | 1974.034 | 1974.033 | 0 | 0.4 | 4327 | 463.4 | 463.4 | 463.4 | 6.87 |
| 970 | R.YLVYGDEYKALRDAVAK.A | | 494.264 | 4 | 1974.033 | 1974.033 | 0 | 0.0 | 4327 | 321.1 | 321.1 | 321.1 | 5.55 |
| 1785 | R.YLVYGDEYK.A | | 575.277 | 2 | 1149.547 | 1149.546 | 0 | 0.5 | 4327 | 302.8 | 302.8 | 302.8 | 5.14 |
| 1785 | R.YLVYGDEYK.A | | 575.277 | 2 | 1149.547 | 1149.546 | 0 | 0.4 | 4327 | 316.4 | 316.4 | 316.4 | 5.10 |
| 1726 | K.AVLEC[+57.021]KPLGIK.T | C[+57] | 409.909 | 3 | 1227.713 | 1227.713 | 0 | 0.1 | 4344 | 572.8 | 572.8 | 572.8 | 9.72 |
| 1726 | K.AVLEC[+57.021]KPLGIK.T | C[+57] | 614.360 | 2 | 1227.713 | 1227.713 | 0 | −0.1 | 4344 | 595.1 | 595.1 | 595.1 | 9.12 |
| 1194 | K.TPQSQQSAYFLLTLFR.E | | 950.503 | 2 | 1899.999 | 1899.996 | 0 | 1.2 | 4362 | 497.0 | 497.0 | 497.0 | 8.80 |
| 1194 | K.TPQSQQSAYFLLTLFR.E | | 634.004 | 3 | 1899.998 | 1899.996 | 0 | 0.9 | 4362 | 364.3 | 364.3 | 364.3 | 7.19 |
| 1878 | R.EVAILYR.S | | 432.253 | 2 | 863.499 | 863.499 | 0 | 0.1 | 4378 | 456.4 | 456.4 | 456.4 | 8.05 |
| 1878 | R.EVAILYR.S | | 432.253 | 2 | 863.499 | 863.499 | 0 | 0.3 | 4378 | 423.0 | 423.0 | 423.0 | 7.35 |
| 1878 | R.EVAILYR.S | | 432.253 | 2 | 863.499 | 863.499 | 0 | 0.1 | 4378 | 344.0 | 344.0 | 344.0 | 5.91 |
| 1685 | R.SHNASLHPTPEQC[+57.021]EAVSK.F | C[+57] | 664.646 | 3 | 1991.924 | 1991.924 | 0 | 0.1 | 4385 | 758.2 | 758.2 | 758.2 | 13.98 |
| 1685 | R.SHNASLHPTPEQC[+57.021]EAVSK.F | C[+57] | 664.646 | 3 | 1991.924 | 1991.924 | 0 | 0.1 | 4385 | 746.9 | 746.9 | 746.9 | 12.98 |
| 1685 | R.SHNASLHPTPEQC[+57.021]EAVSK.F | C[+57] | 498.736 | 4 | 1991.924 | 1991.924 | 0 | −0.1 | 4385 | 478.0 | 478.0 | 478.0 | 8.91 |
| 1759 | K.ILSPPDISR.F | | 499.287 | 2 | 997.568 | 997.568 | 0 | −0.1 | 4409 | 373.4 | 373.4 | 373.4 | 7.23 |
| 1759 | K.ILSPPDISR.F | | 499.287 | 2 | 997.568 | 997.568 | 0 | −0.1 | 4409 | 370.1 | 370.1 | 370.1 | 7.23 |
| 1782 | K.ILSPPDISRFATSLVDNSVPLLR.A | | 837.471 | 3 | 2510.398 | 2510.398 | 0 | 0.0 | 4409 | 395.2 | 395.2 | 395.2 | 7.22 |
| 1759 | K.ILSPPDISR.F | | 499.287 | 2 | 997.568 | 997.568 | 0 | −0.1 | 4409 | 397.8 | 397.8 | 397.8 | 7.03 |
| 1759 | K.ILSPPDISR.F | | 499.288 | 2 | 997.568 | 997.568 | 0 | 0.0 | 4409 | 373.7 | 373.7 | 373.7 | 7.03 |
| 1759 | K.ILSPPDISR.F | | 499.287 | 2 | 997.567 | 997.568 | 0 | −0.3 | 4409 | 380.6 | 380.6 | 380.6 | 6.45 |
| 1759 | K.ILSPPDISR.F | | 499.287 | 2 | 997.567 | 997.568 | 0 | −0.2 | 4409 | 340.3 | 340.3 | 340.3 | 5.13 |
| 1759 | K.ILSPPDISR.F | | 499.287 | 2 | 997.567 | 997.568 | 0 | 0.4 | 4409 | 334.3 | 334.3 | 334.3 | 5.13 |
| 887 | R.FATSLVDNSVPLLR.A | | 766.427 | 2 | 1531.847 | 1531.848 | 0 | −0.3 | 4418 | 626.0 | 626.0 | 626.0 | 10.13 |
| 887 | R.FATSLVDNSVPLLR.A | | 766.428 | 2 | 1531.848 | 1531.848 | 0 | 0.1 | 4418 | 599.9 | 599.9 | 599.9 | 9.72 |
| 1485 | R.FATSLVDN[+0.984]SVPLLR.A | N[+1] | 766.920 | 2 | 1532.832 | 1532.832 | 0 | 0.3 | 4418 | 596.8 | 596.8 | 596.8 | 9.72 |
| 887 | R.FATSLVDNSVPLLR.A | | 766.427 | 2 | 1531.848 | 1531.848 | 0 | −0.3 | 4418 | 561.6 | 561.6 | 561.6 | 9.13 |
| 1485 | R.FATSLVDN[+0.984]SVPLLR.A | N[+1] | 766.920 | 2 | 1532.832 | 1532.832 | 0 | 0.3 | 4418 | 548.6 | 548.6 | 548.6 | 8.98 |
| 1485 | R.FATSLVDN[+0.984]SVPLLR.A | N[+1] | 766.920 | 2 | 1532.832 | 1532.832 | 0 | 0.4 | 4418 | 531.7 | 531.7 | 531.7 | 8.98 |
| 1485 | R.FATSLVDN[+0.984]SVPLLR.A | N[+1] | 766.920 | 2 | 1532.832 | 1532.832 | 0 | 0.2 | 4418 | 488.6 | 488.6 | 488.6 | 8.80 |
| 1485 | R.FATSLVDN[+0.984]SVPLLR.A | N[+1] | 766.920 | 2 | 1532.832 | 1532.832 | 0 | 0.2 | 4418 | 464.3 | 464.3 | 464.3 | 8.05 |
| 887 | R.FATSLVDNSVPLLR.A | | 766.428 | 2 | 1531.848 | 1531.848 | 0 | 0.2 | 4418 | 415.0 | 415.0 | 415.0 | 7.83 |
| 887 | R.FATSLVDNSVPLLR.A | | 766.427 | 2 | 1531.848 | 1531.848 | 0 | −0.3 | 4418 | 550.1 | 550.1 | 550.1 | 7.80 |
| 887 | R.FATSLVDNSVPLLR.A | | 766.428 | 2 | 1531.848 | 1531.848 | 0 | 0.3 | 4418 | 388.3 | 388.3 | 388.3 | 7.42 |
| 1485 | R.FATSLVDN[+0.984]SVPLLR.A | N[+1] | 511.616 | 3 | 1532.832 | 1532.832 | 0 | 0.2 | 4418 | 426.0 | 426.0 | 426.0 | 7.02 |
| 887 | R.FATSLVDNSVPLLR.A | | 511.288 | 3 | 1531.848 | 1531.848 | 0 | 0.1 | 4418 | 420.2 | 420.2 | 420.2 | 7.02 |
| 1485 | R.FATSLVDN[+0.984]SVPLLR.A | N[+1] | 511.615 | 3 | 1532.832 | 1532.832 | 0 | −0.1 | 4418 | 361.0 | 361.0 | 361.0 | 6.90 |
| 887 | R.FATSLVDNSVPLLR.A | | 511.287 | 3 | 1531.847 | 1531.848 | 0 | 0.8 | 4418 | 428.3 | 428.3 | 428.3 | 6.72 |
| 1098 | K.NLAFSPATMAHAFLPTMPEDLLAQAR.R | | 938.476 | 3 | 2813.413 | 2813.411 | 0 | 0.7 | 4467 | 857.6 | 857.6 | 857.6 | 15.95 |
| 941 | K.NLAFSPATMAHAFLPTMPEDLLAQARR.W | | 743.134 | 4 | 2969.515 | 2969.512 | 0 | 0.9 | 4467 | 601.6 | 601.6 | 601.6 | 10.70 |
| 1098 | K.NLAFSPATMAHAFLPTMPEDLLAQAR.R | | 1407.214 | 2 | 2813.420 | 2813.411 | 0 | 3.0 | 4467 | 668.8 | 570.7 | 570.7 | 10.57 |
| 1098 | K.NLAFSPATMAHAFLPTMPEDLLAQAR.R | | 938.474 | 3 | 2813.408 | 2813.411 | 0 | −1.2 | 4467 | 581.4 | 524.1 | 524.1 | 9.39 |
| 1098 | K.NLAFSPATMAHAFLPTMPEDLLAQAR.R | | 704.109 | 4 | 2813.414 | 2813.411 | 0 | 1.0 | 4467 | 552.8 | 552.8 | 552.8 | 8.73 |
| 1628 | K.NLAFSPATMAHAFLPTM[+15.995]PEDLLAQAR.R | M[+16] | 943.808 | 3 | 2829.411 | 2829.406 | 0 | 1.5 | 4467 | 553.9 | 511.9 | 5.0 | 8.65 |
| 1639 | K.NLAFSPATM[+15.995]AHAFLPTMPEDLLAQAR.R | M[+16] | 943.807 | 3 | 2829.405 | 2829.406 | 0 | 0.3 | 4467 | 547.1 | 547.1 | 6.7 | 8.06 |
| 1098 | K.NLAFSPATMAHAFLPTMPEDLLAQAR.R | | 938.475 | 3 | 2813.411 | 2813.411 | 0 | −0.1 | 4467 | 429.8 | 415.2 | 415.2 | 7.80 |
| 941 | K.NLAFSPATMAHAFLPTMPEDLLAQARR.W | | 743.134 | 4 | 2969.516 | 2969.512 | 0 | 1.1 | 4467 | 450.3 | 409.2 | 409.2 | 7.56 |
| 1303 | R.DGFHLVKDKADR.T | | 467.581 | 3 | 1400.728 | 1400.728 | 0 | −0.2 | 4541 | 669.2 | 574.4 | 574.4 | 9.09 |
| 1303 | R.DGFHLVKDKADR.T | | 700.868 | 2 | 1400.728 | 1400.728 | 0 | 0.2 | 4541 | 504.4 | 504.4 | 504.4 | 6.17 |
| 1303 | R.DGFHLVKDKADR.T | | 467.581 | 3 | 1400.728 | 1400.728 | 0 | −0.1 | 4541 | 369.5 | 369.5 | 369.5 | 5.19 |
| 2683 | K.ADRTQTGHVLGNPQRR.D | | 452.243 | 4 | 1805.949 | 1805.948 | 0 | 0.7 | 4550 | 585.6 | 585.6 | 585.6 | 9.09 |
| 2009 | R.TQTGHVLGNPQRR.D | | 488.599 | 3 | 1463.783 | 1463.783 | 0 | 0.3 | 4553 | 375.6 | 375.6 | 375.6 | 6.96 |
| 886 | K.GFLQQHILKDLEQLAK.M | | 627.692 | 3 | 1881.060 | 1881.059 | 0 | 0.6 | 4614 | 634.3 | 634.3 | 634.3 | 10.44 |
| 886 | K.GFLQQHILKDLEQLAK.M | | 471.020 | 4 | 1881.059 | 1881.059 | 0 | 0.1 | 4614 | 485.9 | 485.9 | 485.9 | 8.53 |
| 886 | K.GFLQQHILKDLEQLAK.M | | 627.692 | 3 | 1881.060 | 1881.059 | 0 | 0.5 | 4614 | 484.2 | 484.2 | 484.2 | 8.53 |
| 886 | K.GFLQQHILKDLEQLAK.M | | 941.033 | 2 | 1881.060 | 1881.059 | 0 | 0.1 | 4614 | 469.4 | 469.4 | 469.4 | 6.96 |
| 1043 | K.MLGHSADETIGVVHLVLR.R | | 649.688 | 3 | 1947.050 | 1947.048 | 0 | 0.8 | 4630 | 802.1 | 802.1 | 802.1 | 14.95 |
| 1043 | K.MLGHSADETIGVVHLVLR.R | | 487.517 | 4 | 1947.048 | 1947.048 | 0 | −0.3 | 4630 | 637.2 | 637.2 | 637.2 | 10.39 |
| 819 | K.MLGHSADETIGVVHLVLRR.L | | 526.543 | 4 | 2103.149 | 2103.149 | 0 | −0.2 | 4630 | 584.1 | 584.1 | 584.1 | 9.12 |
| 1625 | K.M[+15.995]LGHSADETIGVVHLVLRR.L | M[+16] | 424.635 | 5 | 2119.145 | 2119.144 | 0 | 0.5 | 4630 | 516.6 | 516.6 | 516.6 | 8.79 |
| 819 | K.MLGHSADETIGVVHLVLRR.L | | 421.436 | 5 | 2103.149 | 2103.149 | 0 | 0.0 | 4630 | 506.8 | 506.8 | 506.8 | 8.79 |
| 1043 | K.MLGHSADETIGVVHLVLR.R | | 487.517 | 4 | 1947.048 | 1947.048 | 0 | −0.3 | 4630 | 363.6 | 363.6 | 363.6 | 7.09 |
| 1043 | K.MLGHSADETIGVVHLVLR.R | | 649.688 | 3 | 1947.048 | 1947.048 | 0 | −0.1 | 4630 | 339.5 | 339.5 | 339.5 | 6.17 |
| 924 | R.RLLQEQHQLSSR.R | | 498.943 | 3 | 1494.814 | 1494.814 | 0 | 0.0 | 4648 | 476.5 | 476.5 | 476.5 | 8.05 |
| 924 | R.RLLQEQHQLSSR.R | | 498.943 | 3 | 1494.814 | 1494.814 | 0 | 0.2 | 4648 | 444.8 | 444.8 | 444.8 | 8.05 |
| 924 | R.RLLQEQHQLSSR.R | | 498.943 | 3 | 1494.814 | 1494.814 | 0 | 0.1 | 4648 | 419.8 | 419.8 | 419.8 | 7.35 |
| 1824 | R.LLQEQHQLSSR.R | | 669.860 | 2 | 1338.713 | 1338.712 | 0 | 0.0 | 4649 | 636.7 | 636.7 | 636.7 | 10.72 |
| 1824 | R.LLQEQHQLSSR.R | | 446.909 | 3 | 1338.713 | 1338.712 | 0 | 0.4 | 4649 | 428.7 | 428.7 | 428.7 | 7.53 |
| 1824 | R.LLQEQHQLSSR.R | | 446.909 | 3 | 1338.712 | 1338.712 | 0 | −0.1 | 4649 | 408.8 | 408.8 | 408.8 | 7.53 |
| 1824 | R.LLQEQHQLSSR.R | | 446.909 | 3 | 1338.712 | 1338.712 | 0 | −0.3 | 4649 | 449.0 | 449.0 | 449.0 | 7.18 |
| 1824 | R.LLQEQHQLSSR.R | | 446.910 | 3 | 1338.714 | 1338.712 | 0 | 1.2 | 4649 | 316.8 | 316.8 | 316.8 | 5.43 |
| 1762 | R.LLQEQHQLSSRR.L | | 498.943 | 3 | 1494.813 | 1494.814 | 0 | −0.3 | 4649 | 352.2 | 276.8 | 276.8 | 4.75 |
| 906 | R.RLLNFDTELSTK.E | | 718.891 | 2 | 1436.774 | 1436.774 | 0 | 0.0 | 4660 | 551.9 | 551.9 | 551.9 | 8.39 |
| 906 | R.RLLNFDTELSTK.E | | 479.596 | 3 | 1436.774 | 1436.774 | 0 | 0.1 | 4660 | 498.5 | 498.5 | 498.5 | 8.21 |
| 906 | R.RLLNFDTELSTK.E | | 479.596 | 3 | 1436.774 | 1436.774 | 0 | 0.1 | 4660 | 469.1 | 469.1 | 469.1 | 8.05 |
| 1111 | R.RLLNFDTELSTKEMR.N | | 463.995 | 4 | 1852.957 | 1852.959 | 0 | 0.6 | 4660 | 517.8 | 517.8 | 517.8 | 7.95 |
| 906 | R.RLLNFDTELSTK.E | | 479.596 | 3 | 1436.774 | 1436.774 | 0 | 0.2 | 4660 | 492.8 | 492.8 | 492.8 | 7.62 |
| 906 | R.RLLNFDTELSTK.E | | 718.891 | 2 | 1436.775 | 1436.774 | 0 | 0.1 | 4660 | 426.5 | 426.5 | 426.5 | 7.53 |
| 906 | R.RLLNFDTELSTK.E | | 479.596 | 3 | 1436.774 | 1436.774 | 0 | 0.1 | 4660 | 417.1 | 417.1 | 417.1 | 7.53 |
| 906 | R.RLLNFDTELSTK.E | | 479.596 | 3 | 1436.774 | 1436.774 | 0 | −0.1 | 4660 | 413.3 | 413.3 | 413.3 | 7.53 |
| 906 | R.RLLNFDTELSTK.E | | 479.596 | 3 | 1436.775 | 1436.774 | 0 | 0.1 | 4660 | 383.4 | 383.4 | 383.4 | 7.23 |
| 1484 | R.RLLN[+0.984]FDTELSTK.E | N[+1] | 479.925 | 3 | 1437.759 | 1437.758 | 0 | 0.3 | 4660 | 368.0 | 222.6 | 222.6 | 5.55 |
| 906 | R.RLLNFDTELSTK.E | | 479.596 | 3 | 1436.774 | 1436.774 | 0 | 0.4 | 4660 | 347.0 | 347.0 | 347.0 | 5.51 |
| 873 | R.LLNFDTELSTKEMR.N | | 566.291 | 3 | 1696.857 | 1696.857 | 0 | −0.1 | 4661 | 496.6 | 496.6 | 496.6 | 8.53 |
| 821 | R.LLNFDTELSTK.E | | 640.840 | 2 | 1280.673 | 1280.673 | 0 | 0.1 | 4661 | 486.6 | 457.5 | 457.5 | 8.21 |
| 1533 | R.LLNFDTELSTKEM[+15.995]R.N | M[+16] | 571.622 | 3 | 1712.852 | 1712.852 | 0 | 0.0 | 4661 | 532.4 | 532.4 | 532.4 | 8.12 |
| 821 | R.LLNFDTELSTK.E | | 640.841 | 2 | 1280.674 | 1280.673 | 0 | 0.5 | 4661 | 483.5 | 483.5 | 483.5 | 7.92 |
| 821 | R.LLNFDTELSTK.E | | 640.841 | 2 | 1280.674 | 1280.673 | 0 | 0.7 | 4661 | 462.2 | 462.2 | 462.2 | 7.76 |
| 821 | R.LLNFDTELSTK.E | | 640.840 | 2 | 1280.674 | 1280.673 | 0 | 0.2 | 4661 | 442.1 | 394.3 | 394.3 | 7.76 |
| 821 | R.LLNFDTELSTK.E | | 640.840 | 2 | 1280.673 | 1280.673 | 0 | 0.1 | 4661 | 437.1 | 371.8 | 371.8 | 7.53 |
| 821 | R.LLNFDTELSTK.E | | 640.841 | 2 | 1280.674 | 1280.673 | 0 | 0.3 | 4661 | 424.3 | 395.5 | 395.5 | 7.53 |
| 821 | R.LLNFDTELSTK.E | | 640.841 | 2 | 1280.674 | 1280.673 | 0 | 0.5 | 4661 | 451.6 | 353.8 | 353.8 | 6.53 |
| 821 | R.LLNFDTELSTK.E | | 640.840 | 2 | 1280.673 | 1280.673 | 0 | 0.0 | 4661 | 352.8 | 352.8 | 352.8 | 5.91 |
| 821 | R.LLNFDTELSTK.E | | 640.840 | 2 | 1280.673 | 1280.673 | 0 | −0.1 | 4661 | 401.0 | 253.3 | 253.3 | 5.62 |
| 821 | R.LLNFDTELSTK.E | | 427.563 | 3 | 1280.674 | 1280.673 | 0 | 0.2 | 4661 | 326.5 | 258.4 | 258.4 | 4.90 |
| 1321 | R.NNWEKEIAAVISPELEHLDK.T | | 779.069 | 3 | 2335.193 | 2335.193 | 0 | −0.1 | 4675 | 650.1 | 650.1 | 650.1 | 11.70 |
| 1321 | R.NNWEKEIAAVISPELEHLDK.T | | 779.069 | 3 | 2335.193 | 2335.193 | 0 | 0.0 | 4675 | 613.3 | 613.3 | 613.3 | 10.70 |
| 1014 | R.NNWEKEIAAVISPELEHLDKTLPTMNNLISQDK.R | | 758.992 | 5 | 3790.932 | 3790.932 | 0 | −0.1 | 4675 | 612.3 | 612.3 | 612.3 | 9.64 |
| 1321 | R.NNWEKEIAAVISPELEHLDK.T | | 779.070 | 3 | 2335.194 | 2335.193 | 0 | 0.5 | 4675 | 582.8 | 582.8 | 582.8 | 9.11 |
| 1498 | R.N[+0.984]NWEKEIAAVISPELEHLDK.T | N[+1] | 584.800 | 4 | 2336.179 | 2336.177 | 0 | 1.1 | 4675 | 518.3 | 518.3 | 0.0 | 8.79 |
| 1321 | R.NNWEKEIAAVISPELEHLDK.T | | 1168.101 | 2 | 2335.194 | 2335.193 | 0 | 0.6 | 4675 | 490.7 | 490.7 | 490.7 | 7.37 |
| 1498 | R.N[+0.984]NWEKEIAAVISPELEHLDK.T | N[+1] | 779.398 | 3 | 2336.180 | 2336.177 | 0 | 1.2 | 4675 | 408.7 | 408.7 | 0.0 | 7.33 |
| 1933 | K.EIAAVISPELEHLDK.T | | 555.302 | 3 | 1663.890 | 1663.890 | 0 | −0.2 | 4680 | 609.6 | 609.6 | 609.6 | 10.13 |
| 1055 | K.EIAAVISPELEHLDKTLPTMNNLISQDKR.I | | 1092.915 | 3 | 3276.730 | 3275.730 | 1 | −1.3 | 4680 | 728.8 | 728.8 | 298.6 | 9.64 |
| 933 | K.EIAAVISPELEHLDK.T | | 555.301 | 3 | 1663.889 | 1663.890 | 0 | −0.4 | 4680 | 571.8 | 571.8 | 571.8 | 9.13 |
| 1597 | K.EIAAVISPELEHLDKTLPTM[+15.995]NNLISQDKR.I | M[+16] | 659.151 | 5 | 3291.724 | 3291.725 | 0 | −0.5 | 4680 | 559.4 | 559.4 | 559.4 | 7.33 |
| 1055 | K.EIAAVISPELEHLDKTLPTMNNLISQDKR.I | | 819.688 | 4 | 3275.729 | 3275.730 | 0 | −0.5 | 4680 | 553.0 | 553.0 | 553.0 | 7.33 |
| 1055 | K.EIAAVISPELEHLDKTLPTMNNLISQDKR.I | | 819.688 | 4 | 3275.729 | 3275.730 | 0 | 0.4 | 4680 | 511.8 | 511.8 | 511.8 | 7.15 |
| 1597 | K.EIAAVISPELEHLDKTLPTM[+15.995]NNLISQDKR.I | M[+16] | 659.151 | 5 | 3291.726 | 3291.725 | 0 | 0.3 | 4680 | 434.3 | 434.3 | 434.3 | 6.75 |
| 1055 | K.EIAAVISPELEHLDKTLPTMNNLISQDKR.I | | 1093.249 | 3 | 3277.733 | 3275.730 | 2 | −1.1 | 4680 | 561.4 | 561.4 | 15.1 | 6.64 |
| 1597 | K.EIAAVISPELEHLDKTLPTM[+15.995]NNLISQDKR.I | M[+16] | 823.687 | 4 | 3291.726 | 3291.725 | 0 | 0.2 | 4680 | 415.0 | 415.0 | 415.0 | 6.46 |
| 1055 | K.EIAAVISPELEHLDKTLPTMNNLISQDKR.I | | 1092.581 | 3 | 3275.727 | 3275.730 | 0 | −1.1 | 4680 | 396.3 | 396.3 | 396.3 | 4.34 |
| 882 | K.TLPTMNNLISQDKR.I | | 815.933 | 2 | 1630.859 | 1630.858 | 0 | 0.6 | 4695 | 558.6 | 558.6 | 558.6 | 8.71 |
| 882 | K.TLPTMNNLISQDKR.I | | 544.291 | 3 | 1630.858 | 1630.858 | 0 | 0.1 | 4695 | 519.1 | 519.1 | 519.1 | 7.94 |
| 1574 | K.TLPTM[+15.995]NNLISQDKR.I | M[+16] | 549.622 | 3 | 1646.853 | 1646.853 | 0 | 0.2 | 4695 | 395.9 | 395.9 | 395.9 | 7.43 |
| 882 | K.TLPTMNNLISQDKR.I | | 544.291 | 3 | 1630.859 | 1630.858 | 0 | 0.4 | 4695 | 368.4 | 368.4 | 368.4 | 6.96 |
| 1574 | K.TLPTM[+15.995]NNLISQDKR.I | M[+16] | 549.622 | 3 | 1646.852 | 1646.853 | 0 | 0.5 | 4695 | 442.3 | 442.3 | 442.3 | 6.90 |
| 1574 | K.TLPTM[+15.995]NNLISQDKR.I | M[+16] | 549.622 | 3 | 1646.852 | 1646.853 | 0 | 0.8 | 4695 | 375.0 | 375.0 | 375.0 | 6.56 |
| 882 | K.TLPTMNNLISQDKR.I | | 544.291 | 3 | 1630.858 | 1630.858 | 0 | −0.2 | 4695 | 363.6 | 363.6 | 363.6 | 6.56 |
| 882 | K.TLPTMNNLISQDKR.I | | 544.291 | 3 | 1630.858 | 1630.858 | 0 | 0.1 | 4695 | 315.9 | 315.9 | 315.9 | 5.35 |
| 882 | K.TLPTMNNLISQDKR.I | | 544.291 | 3 | 1630.858 | 1630.858 | 0 | 0.2 | 4695 | 338.4 | 338.4 | 338.4 | 5.24 |
| 1481 | K.TLPTMN[+0.984]NLISQDKR.I | N[+1] | 544.619 | 3 | 1631.842 | 1631.842 | 0 | 0.2 | 4695 | 333.0 | 283.2 | 76.1 | 5.24 |
| 882 | K.TLPTMNNLISQDKR.I | | 544.291 | 3 | 1630.857 | 1630.858 | 0 | −0.4 | 4695 | 351.4 | 351.4 | 351.4 | 5.05 |
| 1838 | R.ISSNPVAK.I | | 408.234 | 2 | 815.461 | 815.462 | 0 | 1.9 | 4709 | 403.6 | 403.6 | 403.6 | 6.57 |
| 1838 | R.ISSNPVAK.I | | 408.234 | 2 | 815.461 | 815.462 | 0 | −1.7 | 4709 | 324.5 | 324.5 | 324.5 | 5.13 |
| 1172 | K.IIYGDPVTFLPHLPR.K | | 869.488 | 2 | 1737.968 | 1737.969 | 0 | −0.4 | 4717 | 694.0 | 694.0 | 694.0 | 11.13 |
| 846 | K.IIYGDPVTFLPHLPRK.S | | 467.272 | 4 | 1866.064 | 1866.064 | 0 | 0.3 | 4717 | 628.8 | 628.8 | 628.8 | 10.44 |
| 846 | K.IIYGDPVTFLPHLPRK.S | | 467.271 | 4 | 1866.064 | 1866.064 | 0 | 0.2 | 4717 | 621.5 | 621.5 | 621.5 | 10.44 |
| 1172 | K.IIYGDPVTFLPHLPR.K | | 579.994 | 3 | 1737.969 | 1737.969 | 0 | 0.0 | 4717 | 570.9 | 570.9 | 570.9 | 9.72 |
| 1172 | K.IIYGDPVTFLPHLPR.K | | 579.994 | 3 | 1737.968 | 1737.969 | 0 | −0.1 | 4717 | 492.7 | 492.7 | 492.7 | 8.80 |
| 1172 | K.IIYGDPVTFLPHLPR.K | | 579.994 | 3 | 1737.968 | 1737.969 | 0 | 0.2 | 4717 | 558.3 | 558.3 | 558.3 | 8.40 |
| 1172 | K.IIYGDPVTFLPHLPR.K | | 869.487 | 2 | 1737.967 | 1737.969 | 0 | −1.1 | 4717 | 528.7 | 528.7 | 528.7 | 8.40 |
| 846 | K.IIYGDPVTFLPHLPRK.S | | 622.693 | 3 | 1866.065 | 1866.064 | 0 | 0.6 | 4717 | 452.4 | 452.4 | 452.4 | 8.38 |
| 846 | K.IIYGDPVTFLPHLPRK.S | | 467.271 | 4 | 1866.064 | 1866.064 | 0 | 0.0 | 4717 | 437.4 | 437.4 | 437.4 | 8.15 |
| 1172 | K.IIYGDPVTFLPHLPR.K | | 435.248 | 4 | 1737.969 | 1737.969 | 0 | 0.4 | 4717 | 471.2 | 471.2 | 471.2 | 8.13 |
| 1172 | K.IIYGDPVTFLPHLPR.K | | 579.995 | 3 | 1737.969 | 1737.969 | 0 | 0.2 | 4717 | 381.9 | 381.9 | 381.9 | 7.71 |
| 1172 | K.IIYGDPVTFLPHLPR.K | | 580.329 | 3 | 1738.971 | 1737.969 | 1 | 0.4 | 4717 | 365.6 | 365.6 | 365.6 | 6.83 |
| 846 | K.IIYGDPVTFLPHLPRK.S | | 933.536 | 2 | 1866.065 | 1866.064 | 0 | 0.5 | 4717 | 434.6 | 434.6 | 434.6 | 6.73 |
| 2008 | R.KRITVEYLQHIVEQK.N | | 471.773 | 4 | 1884.070 | 1884.070 | 0 | 0.0 | 4745 | 510.3 | 457.8 | 457.8 | 7.94 |
| 2008 | R.KRITVEYLQHIVEQK.N | | 471.773 | 4 | 1884.070 | 1884.070 | 0 | 0.1 | 4745 | 342.7 | 342.7 | 342.7 | 5.82 |
| 2337 | K.RITVEYLQHIVEQK.N | | 439.750 | 4 | 1755.976 | 1755.975 | 0 | 0.6 | 4746 | 589.2 | 589.2 | 589.2 | 9.72 |
| 2337 | K.RITVEYLQHIVEQK.N | | 585.996 | 3 | 1755.975 | 1755.975 | 0 | −0.4 | 4746 | 454.0 | 454.0 | 454.0 | 8.06 |
| 1159 | R.ITVEYLQHIVEQK.N | | 800.441 | 2 | 1599.875 | 1599.874 | 0 | 0.4 | 4747 | 718.1 | 665.7 | 665.7 | 12.72 |
| 1159 | R.ITVEYLQHIVEQK.N | | 533.963 | 3 | 1599.874 | 1599.874 | 0 | −0.2 | 4747 | 664.6 | 664.6 | 664.6 | 11.72 |
| 1159 | R.ITVEYLQHIVEQK.N | | 800.441 | 2 | 1599.874 | 1599.874 | 0 | 0.0 | 4747 | 636.1 | 532.2 | 532.2 | 10.72 |
| 1159 | R.ITVEYLQHIVEQK.N | | 533.963 | 3 | 1599.874 | 1599.874 | 0 | 0.0 | 4747 | 621.6 | 621.6 | 621.6 | 10.72 |
| 1512 | R.ITVEYLQHIVEQKN[+0.984]GKER.V | N[+1] | 547.046 | 4 | 2185.161 | 2185.161 | 0 | 0.0 | 4747 | 595.2 | 595.2 | 505.5 | 9.36 |
| 1159 | R.ITVEYLQHIVEQK.N | | 800.441 | 2 | 1599.875 | 1599.874 | 0 | 0.4 | 4747 | 555.5 | 453.9 | 453.9 | 8.98 |
| 879 | R.VPILWHFLQKEAELR.L | | 470.520 | 4 | 1879.059 | 1879.059 | 0 | 0.2 | 4765 | 442.5 | 442.5 | 442.5 | 8.38 |
| 863 | R.VPILWHFLQK.E | | 640.880 | 2 | 1280.752 | 1280.751 | 0 | 0.4 | 4765 | 456.8 | 456.8 | 456.8 | 7.76 |
| 863 | R.VPILWHFLQK.E | | 427.589 | 3 | 1280.752 | 1280.751 | 0 | 0.2 | 4765 | 442.0 | 442.0 | 442.0 | 7.76 |
| 863 | R.VPILWHFLQK.E | | 427.589 | 3 | 1280.751 | 1280.751 | 0 | −0.1 | 4765 | 406.8 | 406.8 | 406.8 | 7.53 |
| 879 | R.VPILWHFLQKEAELR.L | | 470.770 | 4 | 1880.057 | 1879.059 | 1 | −2.8 | 4765 | 440.6 | 440.6 | 440.6 | 7.00 |
| 853 | K.FLPEILALQR.D | | 600.361 | 2 | 1199.715 | 1199.715 | 0 | 0.4 | 4783 | 439.9 | 439.9 | 439.9 | 7.35 |
| 853 | K.FLPEILALQR.D | | 600.361 | 2 | 1199.715 | 1199.715 | 0 | 0.2 | 4783 | 425.0 | 425.0 | 425.0 | 7.35 |
| 853 | K.FLPEILALQR.D | | 400.576 | 3 | 1199.715 | 1199.715 | 0 | 0.1 | 4783 | 441.5 | 441.5 | 441.5 | 7.05 |
| 853 | K.FLPEILALQR.D | | 600.361 | 2 | 1199.715 | 1199.715 | 0 | 0.0 | 4783 | 362.7 | 362.7 | 362.7 | 7.03 |
| 853 | K.FLPEILALQR.D | | 600.361 | 2 | 1199.715 | 1199.715 | 0 | 0.6 | 4783 | 313.3 | 313.3 | 313.3 | 5.14 |
| 1019 | R.DLVKQFQNVQQVEYSSIR.G | | 1091.069 | 2 | 2181.131 | 2181.130 | 0 | 0.5 | 4793 | 492.0 | 425.9 | 425.9 | 8.79 |
| 1019 | R.DLVKQFQNVQQVEYSSIR.G | | 727.715 | 3 | 2181.131 | 2181.130 | 0 | 0.3 | 4793 | 477.2 | 477.2 | 477.2 | 8.64 |
| 1019 | R.DLVKQFQNVQQVEYSSIR.G | | 1091.069 | 2 | 2181.131 | 2181.130 | 0 | 0.5 | 4793 | 381.7 | 381.7 | 381.7 | 8.29 |
| 1019 | R.DLVKQFQNVQQVEYSSIR.G | | 727.716 | 3 | 2181.132 | 2181.130 | 0 | 0.9 | 4793 | 458.7 | 458.7 | 458.7 | 8.04 |
| 1019 | R.DLVKQFQNVQQVEYSSIR.G | | 728.050 | 3 | 2182.136 | 2181.130 | 1 | 1.0 | 4793 | 418.5 | 418.5 | 159.7 | 7.52 |
| 1019 | R.DLVKQFQNVQQVEYSSIR.G | | 727.715 | 3 | 2181.131 | 2181.130 | 0 | 0.4 | 4793 | 406.9 | 406.9 | 406.9 | 7.52 |
| 818 | K.QFQNVQQVEYSSIR.G | | 863.431 | 2 | 1725.854 | 1725.856 | 0 | −0.7 | 4797 | 619.9 | 619.9 | 619.9 | 10.13 |
| 818 | K.QFQNVQQVEYSSIR.G | | 575.956 | 3 | 1725.855 | 1725.856 | 0 | −0.4 | 4797 | 495.3 | 495.3 | 495.3 | 7.70 |
| 925 | R.ITVFLSTWNK.L | | 604.837 | 2 | 1208.667 | 1208.667 | 0 | −0.3 | 4829 | 484.7 | 484.7 | 484.7 | 7.33 |
| 1720 | R.SLETNGEINLPKDYC[+57.021]STDLDLDTEFEILLPR.R | C[+57] | 1204.588 | 3 | 3611.748 | 3610.747 | 1 | −0.6 | 4842 | 759.8 | 696.8 | 308.4 | 12.41 |
| 1146 | R.SLETNGEINLPK.D | | 657.849 | 2 | 1314.690 | 1314.690 | 0 | 0.0 | 4842 | 581.5 | 581.5 | 581.5 | 9.72 |
| 1720 | R.SLETNGEINLPKDYC[+57.021]STDLDLDTEFEILLPR.R | C[+57] | 1204.249 | 3 | 3610.733 | 3610.747 | 0 | −3.7 | 4842 | 423.1 | 310.9 | 310.9 | 3.32 |
| 1715 | R.GLGLC[+57.021]ATALVSYLIR.L | C[+57] | 536.304 | 3 | 1606.899 | 1606.899 | 0 | 0.2 | 4875 | 508.9 | 508.9 | 508.9 | 8.29 |
| 1819 | R.LHNEIVYAVEKLSK.E | | 411.485 | 4 | 1642.916 | 1642.916 | 0 | 0.1 | 4890 | 489.4 | 489.4 | 489.4 | 8.53 |
| 1246 | R.LHNEIVYAVEK.L | | 438.907 | 3 | 1314.705 | 1314.705 | 0 | 0.3 | 4890 | 429.0 | 429.0 | 429.0 | 7.24 |
| 1246 | R.LHNEIVYAVEK.L | | 438.907 | 3 | 1314.705 | 1314.705 | 0 | −0.2 | 4890 | 374.6 | 374.6 | 374.6 | 7.23 |
| 1819 | R.LHNEIVYAVEKLSK.E | | 411.485 | 4 | 1642.916 | 1642.916 | 0 | 0.0 | 4890 | 340.5 | 340.5 | 340.5 | 5.63 |
| 1819 | R.LHNEIVYAVEKLSK.E | | 411.485 | 1 | 1642.917 | 1642.916 | 0 | 0.4 | 4890 | 306.9 | 306.9 | 306.9 | 5.16 |
| 4652 | R.DLTPLILSNC[+57.021]QYQVEEGRETVQEFDLEK.I | C[+57] | 1118.880 | 3 | 3354.626 | 3353.621 | 1 | 0.6 | 4928 | 394.2 | 394.2 | 14.0 | 7.02 |
| 900 | R.ETVQEFDLEK.I | | 619.301 | 2 | 1237.595 | 1237.595 | 0 | 0.0 | 4946 | 454.6 | 317.0 | 317.0 | 6.14 |
| 1004 | R.LSLKGIPTLVYR.H | | 453.950 | 3 | 1359.836 | 1359.836 | 0 | −0.1 | 4971 | 622.5 | 622.5 | 622.5 | 10.44 |
| 1912 | K.GIPTLVYR.H | | 459.774 | 2 | 918.541 | 918.541 | 0 | 0.4 | 4975 | 354.0 | 354.0 | 354.0 | 5.71 |
| 966 | R.HDWNYEHLFMDIK.N | | 583.268 | 3 | 1747.789 | 1747.790 | 0 | −0.5 | 4983 | 508.4 | 508.4 | 508.4 | 8.22 |
| 1611 | R.HDWNYEHLFM[+15.995]DIKNK.M | M[+16] | 502.236 | 1 | 2005.923 | 2005.923 | 0 | 0.3 | 4983 | 489.1 | 489.1 | 489.1 | 7.94 |
| 1565 | R.HDWNYEHLFM[+15.995]DIK.N | M[+16 | 441.702 | 4 | 1763.785 | 1763.785 | 0 | 0.0 | 4983 | 362.2 | 362.2 | 362.2 | 7.23 |
| 1565 | R.HDWNYEHLFM[+15.995]DIK.N | M[+16] | 588.600 | 3 | 1763.784 | 1763.785 | 0 | 0.2 | 4983 | 472.4 | 472.4 | 472.4 | 7.18 |
| 1565 | R.HDWNYEHLFM[+15.995]DIK.N | M[+16] | 588.600 | 3 | 1763.784 | 1763.785 | 0 | −0.2 | 4983 | 462.7 | 462.7 | 462.7 | 7.18 |
| 966 | R.HDWNYEHLFMDIK.N | | 874.398 | 2 | 1747.789 | 1747.790 | 0 | 0.3 | 4983 | 528.9 | 528.9 | 528.9 | 6.98 |
| 966 | R.HDWNYEHLFMDIK.N | | 874.398 | 2 | 1747.788 | 1747.790 | 0 | −1.0 | 4983 | 439.3 | 439.3 | 439.3 | 6.42 |
| 2192 | R.HDWNYEHLFMDIKNK.M | | 498.237 | 4 | 1989.927 | 1989.928 | 0 | −0.1 | 4983 | 354.0 | 354.0 | 354.0 | 5.82 |
| 966 | R.HDWNYEHLFMDIK.N | | 583.602 | 3 | 1748.793 | 1747.790 | 1 | 0.2 | 4983 | 339.8 | 339.8 | 339.8 | 5.71 |
| 1565 | R.HDWNYEHLFM[+15.995]DIK.N | M[+16] | 588.600 | 3 | 1763.784 | 1763.785 | 0 | −0.2 | 4983 | 350.5 | 350.5 | 350.5 | 5.32 |
| 966 | R.HDWNYEHLFMDIK.N | | 437.703 | 4 | 1747.789 | 1747.790 | 0 | −0.4 | 4983 | 341.7 | 341.7 | 341.7 | 5.32 |
| 1020 | K.HTIALWQFLSAHKSEQLLR.L | | 570.317 | 4 | 2278.247 | 2278.246 | 0 | 0.7 | 5074 | 706.0 | 706.0 | 706.0 | 12.70 |
| 2095 | K.HTIALWQFLSAHK.S | | 517.952 | 3 | 1551.841 | 1551.843 | 0 | −1.2 | 5074 | 412.4 | 412.4 | 412.4 | 6.76 |
| 2095 | K.HTIALWQFLSAHK.S | | 517.952 | 3 | 1551.842 | 1551.843 | 0 | −0.5 | 5074 | 399.0 | 399.0 | 399.0 | 6.64 |
| 903 | R.LHKEPFGEISSR.Y | | 467.249 | 3 | 1399.733 | 1399.733 | 0 | 0.1 | 5093 | 585.6 | 585.6 | 585.6 | 9.44 |
| 903 | R.LHKEPFGEISSR.Y | | 467.249 | 3 | 1399.734 | 1399.733 | 0 | 0.6 | 5093 | 576.2 | 576.2 | 576.2 | 9.44 |
| 903 | R.LHKEPFGEISSR.Y | | 467.249 | 3 | 1399.733 | 1399.733 | 0 | 0.1 | 5093 | 569.8 | 569.8 | 569.8 | 9.44 |
| 903 | R.LHKEPFGEISSR.Y | | 467.249 | 3 | 1399.733 | 1399.733 | 0 | −0.1 | 5093 | 546.1 | 546.1 | 546.1 | 8.71 |
| 903 | R.LHKEPFGEISSR.Y | | 467.249 | 3 | 1399.733 | 1399.733 | 0 | 0.1 | 5093 | 540.7 | 540.7 | 540.7 | 8.12 |
| 903 | R.LHKEPFGEISSR.Y | | 467.249 | 3 | 1399.733 | 1399.733 | 0 | 0.0 | 5093 | 519.4 | 519.4 | 519.4 | 7.94 |
| 903 | R.LHKEPFGEISSR.Y | | 467.249 | 3 | 1399.733 | 1399.733 | 0 | 0.0 | 5093 | 441.0 | 441.0 | 441.0 | 7.49 |
| 903 | R.LHKEPFGEISSR.Y | | 467.249 | 3 | 1399.732 | 1399.733 | 0 | −0.6 | 5093 | 483.3 | 483.3 | 483.3 | 7.35 |
| 903 | R.LHKEPFGEISSR.Y | | 467.249 | 3 | 1399.733 | 1399.733 | 0 | 0.2 | 5093 | 365.2 | 365.2 | 365.2 | 6.96 |
| 903 | R.LHKEPFGEISSR.Y | | 467.249 | 3 | 1399.732 | 1399.733 | 0 | −0.4 | 5093 | 399.8 | 399.8 | 399.8 | 6.56 |
| 903 | R.LHKEPFGEISSR.Y | | 700.370 | 2 | 1399.733 | 1399.733 | 0 | 0.3 | 5093 | 490.1 | 490.1 | 490.1 | 6.52 |
| 903 | R.LHKEPFGEISSR.Y | | 467.249 | 3 | 1399.732 | 1399.733 | 0 | −0.4 | 5093 | 424.5 | 424.5 | 424.5 | 6.49 |
| 903 | R.LHKEPFGEISSR.Y | | 700.370 | 2 | 1399.732 | 1399.733 | C | −0.4 | 5093 | 341.9 | 341.9 | 341.9 | 3.82 |
| 903 | R.LHKEPFGEISSR.Y | | 467.581 | 3 | 1400.728 | 1399.733 | 1 | −5.6 | 5093 | 357.4 | 357.4 | 357.4 | 2.63 |
| 903 | R.LHKEPFGEISSR.Y | | 467.581 | 3 | 1400.728 | 1399.733 | 1 | 5.6 | 5093 | 319.5 | 319.5 | 319.5 | 2.16 |
| 1820 | K.EPFGEISSR.Y | | 511.251 | 2 | 1021.495 | 1021.495 | 0 | −0.4 | 5096 | 372.6 | 372.6 | 372.6 | 6.64 |
| 1820 | K.EPFGEISSR.Y | | 511.251 | 2 | 1021.495 | 1021.495 | 0 | −0.1 | 5096 | 314.2 | 314.2 | 314.2 | 5.43 |
| 2609 | R.YKADLSPENAK.L | | 618.318 | 2 | 1235.628 | 1235.627 | 0 | 0.9 | 5105 | 535.1 | 535.1 | 535.1 | 8.71 |
| 1450 | K.LLSTFLNQTGLDAFLLELHEMIILK.L | | 958.203 | 3 | 2872.593 | 2872.589 | 0 | 1.4 | 5116 | 824.3 | 824.3 | 824.3 | 14.95 |
| 2126 | R.FRPQWSLR.D | | 545.301 | 2 | 1089.595 | 1089.595 | 0 | 0.1 | 5152 | 413.0 | 413.0 | 413.0 | 7.35 |
| 2126 | R.FRPQWSLR.D | | 545.301 | 2 | 1089.595 | 1089.595 | 0 | 0.4 | 5152 | 452.5 | 452.5 | 452.5 | 6.80 |
| 1786 | R.FRPQWSLRDTLVSYMQTK.E | | 564.795 | 4 | 2256.160 | 2256.159 | 0 | 0.1 | 5152 | 302.4 | 302.4 | 302.4 | 5.61 |
| 1786 | R.FRPQWSLRDTLVSYMQTK.E | | 752.725 | 3 | 2256.159 | 2256.159 | 0 | −0.3 | 5152 | 338.5 | 338.5 | 338.5 | 5.31 |
| 1540 | R.DTLVSYM[+15.995]QTK.E | M[+16] | 601.292 | 2 | 1201.577 | 1201.577 | 0 | 0.0 | 5160 | 549.8 | 546.8 | 546.8 | 8.39 |
| 861 | R.DTLVSYMQTK.E | | 593.295 | 2 | 1185.582 | 1185.582 | 0 | 0.2 | 5160 | 489.6 | 489.6 | 489.6 | 8.21 |
| 861 | R.DTLVSYMQTK.E | | 593.295 | 2 | 1185.582 | 1185.582 | 0 | 0.2 | 5160 | 475.0 | 475.0 | 475.0 | 8.05 |
| 861 | R.DTLVSYMQTK.E | | 593.295 | 2 | 1185.582 | 1185.582 | 0 | 0.4 | 5160 | 381.8 | 381.8 | 381.8 | 7.42 |
| 1734 | K.ESEILPEMASQFPEEILLASC[+57.021]VSVWK.T | C[+57] | 1496.740 | 2 | 2992.472 | 2992.468 | 0 | 1.2 | 5170 | 564.5 | 452.7 | 452.7 | 9.98 |
| 1734 | K.ESEILPEMASQFPEEILLASC[+57.021]VSVWK.T | C[+57] | 998.162 | 3 | 2992.472 | 2992.468 | 0 | 1.2 | 5170 | 582.1 | 574.8 | 574.8 | 9.46 |
| 1734 | K.ESEILPEMASQFPEEILLASC[+57.021]VSVWK.T | C[+57] | 998.162 | 3 | 2992.470 | 2992.468 | 0 | 0.7 | 5170 | 575.2 | 551.3 | 551.3 | 9.46 |
| 1144 | K.DNTVPLKLIALLANGEFHSGEQLGETLGMSR.A | | 828.433 | 4 | 3310.710 | 3310.710 | 0 | 0.0 | 5226 | 815.5 | 815.5 | 815.5 | 13.99 |
| 1144 | K.DNTVPLKLIALLANGEFHSGEQLGETLGMSR.A | | 828.682 | 4 | 3311.708 | 3310.710 | 1 | −1.8 | 5226 | 802.5 | 802.5 | 320.4 | 13.41 |
| 1144 | K.DNTVPLKLIALLANGEFHSGEQLGETLGMSR.A | | 1104.241 | 3 | 3310.709 | 3310.710 | 0 | −0.4 | 5226 | 774.1 | 774.1 | 774.1 | 12.41 |
| 1144 | K.DNTVPLKLIALLANGEFHSGEQLGETLGMSR.A | | 1104.242 | 3 | 3310.710 | 3310.710 | 0 | 0.0 | 5226 | 719.1 | 719.1 | 719.1 | 11.99 |
| 1575 | K.DNTVPLKLIALLANGEFHSGEQLGETLGM[+15.995]SR.A | M[+16] | 832.431 | 4 | 3326.702 | 3326.705 | ) | 0.8 | 5226 | 675.8 | 580.0 | 580.0 | 10.41 |
| 1144 | K.DNTVPLKLIALLANGEFHSGEQLGETLGMSR.A | | 1104.241 | 3 | 3310.708 | 3310.710 | 0 | 0.6 | 5226 | 612.9 | 612.9 | 612.9 | 9.41 |
| 1144 | K.DNTVPLKLIALLANGEFHSGEQLGETLGMSR.A | | 662.948 | 5 | 3310.710 | 3310.710 | 0 | 0.0 | 5226 | 589.5 | 589.5 | 589.5 | 8.47 |
| 1575 | K.DNTVPLKLIALLANGEFHSGEQLGETLGM[+15.995]SR.A | M[+16] | 832.431 | 4 | 3326.703 | 3326.705 | 0 | −0.5 | 5226 | 569.1 | 569.1 | 569.1 | 7.52 |
| 1144 | K.DNTVPLKLIALLANGEFHSGEQLGETLGMSR.A | | 828.433 | 4 | 3310.710 | 3310.710 | 0 | 0.1 | 5226 | 497.6 | 497.6 | 497.6 | 7.48 |
| 1144 | K.DNTVPLKLIALLANGEFHSGEQLGETLGMSR.A | | 828.433 | 4 | 3310.710 | 3310.710 | 0 | 0.1 | 5226 | 472.2 | 458.4 | 458.4 | 6.85 |
| 1575 | K.DNTVPLKLIALLANGEFHSGEQLGETLGM[+15.995]SR.A | M[+16] | 832.432 | 4 | 3326.706 | 3326.705 | 0 | 0.2 | 5226 | 349.2 | 349.2 | 349.2 | 5.37 |
| 1515 | K.LIALLAN[+0.984]GEFHSGEQLGETLGMSR.A | N[+1] | 848.764 | 3 | 2544.277 | 2544.276 | 0 | 0.4 | 5233 | 647.4 | 569.2 | 81.4 | 10.98 |
| 1515 | K.LIALLAN[+0.984]GEFHSGEQLGETLGMSR.A | N[+1] | 848.764 | 3 | 2544.279 | 2544.276 | 0 | 0.9 | 5233 | 562.6 | 524.8 | 260.9 | 9.98 |
| 874 | K.LIALLANGEFHSGEQLGETLGMSR.A | | 848.436 | 3 | 2543.292 | 2543.292 | 0 | −0.2 | 5233 | 388.5 | 388.5 | 388.5 | 7.97 |
| 874 | K.LIALLANGEFHSGEQLGETLGMSR.A | | 848.436 | 3 | 2543.295 | 2543.292 | 0 | 0.9 | 5233 | 377.9 | 377.9 | 377.9 | 7.49 |
| 874 | K.LIALLANGEFHSGEQLGETLGMSR.A | | 848.435 | 3 | 2543.291 | 2543.292 | 0 | 0.5 | 5233 | 408.5 | 388.0 | 388.0 | 7.21 |
| 874 | K.LIALLANGEFHSGEQLGETLGMSR.A | | 848.436 | 3 | 2543.293 | 2543.292 | 0 | 0.1 | 5233 | 321.6 | 312.1 | 312.1 | 5.96 |
| 852 | R.AAINKHIQTLR.D | | 422.255 | 3 | 1264.750 | 1264.748 | 0 | 1.2 | 5257 | 544.1 | 544.1 | 544.1 | 8.71 |
| 852 | R.AAINKHIQTLR.D | | 422.255 | 3 | 1264.749 | 1264.748 | 0 | 0.7 | 5257 | 527.0 | 487.0 | 487.0 | 8.71 |
| 852 | R.AAINKHIQTLR.D | | 422.255 | 3 | 1264.750 | 1264.748 | 0 | 1.1 | 5257 | 515.8 | 472.3 | 472.3 | 8.53 |
| 852 | R.AAINKHIQTLR.D | | 422.255 | 3 | 1264.749 | 1264.748 | 0 | 0.6 | 5257 | 497.4 | 497.4 | 497.4 | 8.53 |
| 852 | R.AAINKHIQTLR.D | | 422.254 | 3 | 1264.749 | 1264.748 | 0 | 0.2 | 5257 | 483.5 | 471.1 | 471.1 | 8.53 |
| 852 | R.AAINKHIQTLR.D | | 422.255 | 3 | 1264.750 | 1264.748 | 0 | 1.3 | 5257 | 411.9 | 411.9 | 411.9 | 8.15 |
| 1796 | R.AAINKHIQTLRDWGVDVFTVPGK.G | | 642.104 | 4 | 2565.394 | 2565.394 | 0 | 0.1 | 5257 | 329.0 | 329.0 | 329.0 | 5.73 |
| 1796 | R.AAINKHIQTLRDWGVDVFTVPGK.G | | 855.803 | 3 | 2565.393 | 2565.394 | 0 | 0.1 | 5257 | 303.1 | 303.1 | 303.1 | 3.84 |
| 826 | K.HIQTLRDWGVDVFTVPGKGYSLPEPIPLLNAK.Q | | 890.988 | 4 | 3560.928 | 3560.926 | 0 | 0.5 | 5262 | 638.5 | 638.5 | 638.5 | 9.64 |
| 826 | K.HIQTLRDWGVDVFTVPGKGYSLPEPIPLLNAK.Q | | 890.987 | 4 | 3560.927 | 3560.926 | 0 | 0.1 | 5262 | 608.7 | 608.7 | 608.7 | 9.64 |
| 826 | K.HIQTLRDWGVDVFTVPGKGYSLPEPIPLLNAK.Q | | 890.987 | 4 | 3560.927 | 3560.926 | 0 | 0.1 | 5262 | 564.3 | 564.3 | 564.3 | 8.64 |
| 826 | K.HIQTLRDWGVDVFTVPGKGYSLPEPIPLLNAK.Q | | 712.992 | 5 | 3560.929 | 3560.926 | 0 | 0.7 | 5262 | 544.0 | 544.0 | 544.0 | 7.91 |
| 1810 | K.HIQTLRDWGVDVFTVPGK.G | | 690.038 | 3 | 2068.099 | 2068.097 | 0 | 0.5 | 5262 | 394.3 | 394.3 | 394.3 | 7.40 |
| 826 | K.HIQTLRDWGVDVFTVPGKGYSLPEPIPLLNAK.Q | | 712.991 | 5 | 3560.927 | 3560.926 | 0 | 0.2 | 5262 | 403.1 | 403.1 | 403.1 | 7.35 |
| 826 | K.HIQTLRDWGVDVFTVPGKGYSLPEPIPLLNAK.Q | | 712.991 | 5 | 3560.928 | 3560.926 | 0 | 0.4 | 5262 | 422.6 | 422.6 | 422.6 | 6.75 |
| 826 | K.HIQTLRDWGVDVFTVPGKGYSLPEPIPLLNAK.Q | | 594.327 | 6 | 3560.924 | 3560.926 | 0 | 0.7 | 5262 | 376.4 | 376.4 | 376.4 | 6.13 |
| 826 | K.HIQTLRDWGVDVFTVPGKGYSLPEPIPLLNAK.Q | | 594.328 | 6 | 3560.929 | 3560.926 | 0 | 0.6 | 5262 | 389.3 | 389.3 | 389.3 | 6.12 |
| 1810 | K.HIQTLRDWGVDVFTVPGK.G | | 690.038 | 3 | 2068.098 | 2068.097 | 0 | 0.3 | 5262 | 332.7 | 332.7 | 332.7 | 5.89 |
| 826 | K.HIQTLRDWGVDVFTVPGKGYSLPEPIPLLNAK.Q | | 712.991 | 5 | 3560.927 | 3560.926 | 0 | 0.1 | 5262 | 343.1 | 343.1 | 343.1 | 5.31 |
| 826 | K.HIQTLRDWGVDVFTVPGKGYSLPEPIPLLNAK.Q | | 712.992 | 5 | 3560.929 | 3560.926 | 0 | 0.8 | 5262 | 308.2 | 308.2 | 308.2 | 4.55 |
| 1109 | R.DWGVDVFTVPGKGYSLPEPIPLLNAK.Q | | 938.170 | 3 | 2812.496 | 2812.492 | 0 | 1.5 | 5268 | 838.9 | 838.9 | 838.9 | 14.70 |
| 1510 | R.DWGVDVFTVPGKGYSLPEPIPLLN[+0.984]AK.Q | N[+1] | 938.498 | 3 | 2813.479 | 2813.476 | 0 | 1.0 | 5268 | 807.0 | 807.0 | 502.2 | 14.70 |
| 1109 | R.DWGVDVFTVPGKGYSLPEPIPLLNAK.Q | | 1406.751 | 2 | 2812.495 | 2812.492 | 0 | 0.9 | 5268 | 722.6 | 722.6 | 722.6 | 12.70 |
| 1109 | R.DWGVDVFTVPGKGYSLPEPIPLLNAK.Q | | 703.879 | 4 | 2812.495 | 2812.492 | 0 | 1.2 | 5268 | 560.6 | 560.6 | 560.6 | 9.19 |
| 1510 | R.DWGVDVFTVPGKGYSLPEPIPLLN[+0.984]AK.Q | N[+1] | 938.497 | 3 | 2813.478 | 2813.476 | 0 | 0.6 | 5268 | 577.7 | 577.7 | 215.8 | 8.82 |
| 931 | R.DWGVDVFTVPGK.G | | 660.335 | 2 | 1319.663 | 1319.663 | 0 | 0.3 | 5268 | 535.9 | 535.9 | 535.9 | 8.39 |
| 1510 | R.DWGVDVFTVPGKGYSLPEPIPLLN[+0.984]AK.Q | N[+1] | 938.498 | 3 | 2813.479 | 2813.476 | 0 | 1.0 | 5268 | 488.5 | 488.5 | 182.6 | 7.72 |
| 931 | R.DWGVDVFTVPGK.G | | 660.336 | 2 | 1319.664 | 1319.663 | 0 | 0.5 | 5268 | 425.7 | 425.7 | 425.7 | 7.53 |
| 1109 | R.DWGVDVFTVPGKGYSLPEPIPLLNAK.Q | | 938.163 | 3 | 2812.474 | 2812.492 | 0 | −6.4 | 5268 | 587.1 | 566.6 | 566.6 | 7.49 |
| 931 | R.DWGVDVFTVPGK.G | | 660.335 | 2 | 1319.663 | 1319.663 | 0 | 0.1 | 5268 | 374.9 | 374.9 | 374.9 | 7.42 |
| 931 | R.DWGVDVFTVPGK.G | | 440.559 | 3 | 1319.663 | 1319.663 | 0 | 0.2 | 5268 | 403.1 | 403.1 | 403.1 | 6.83 |
| 1109 | R.DWGVDVFTVPGKGYSLPEPIPLLNAK.Q | | 703.879 | 4 | 2812.493 | 2812.492 | 0 | 0.4 | 5268 | 324.4 | 324.4 | 324.4 | 5.38 |
| 2046 | R.DWGVDVFTVPGKGYSLPEPIPLLNAKQILGQLDGGSVAVLPVVDS | | 1133.798 | 5 | 5664.963 | 5664.000 | 1 | −7.2 | 5268 | 374.2 | 374.2 | 30.5 | 3.02 |
| | TNQYLLDR.I | | | | | | | | | | | | |
| 950 | K.GYSLPEPIPLLNAK.Q | | 756.427 | 2 | 1511.846 | 1511.847 | 0 | 0.5 | 5280 | 669.9 | 669.9 | 669.9 | 11.13 |
| 950 | K.GYSLPEPIPLLNAK.Q | | 756.427 | 2 | 1511.847 | 1511.847 | 0 | 0.1 | 5280 | 569.8 | 569.8 | 569.8 | 9.72 |
| 950 | K.GYSLPEPIPLLNAK.Q | | 756.427 | 2 | 1511.847 | 1511.847 | 0 | 0.1 | 5280 | 507.5 | 507.5 | 507.5 | 8.80 |
| 950 | K.GYSLPEPIPLLNAK.Q | | 504.620 | 3 | 1511.847 | 1511.847 | 0 | −0.1 | 5280 | 535.2 | 535.2 | 535.2 | 8.47 |
| 950 | K.GYSLPEPIPLLNAK.Q | | 756.427 | 2 | 1511.847 | 1511.847 | 0 | −0.1 | 5280 | 415.2 | 415.2 | 415.2 | 8.42 |
| 950 | K.GYSLPEPIPLLNAK.Q | | 756.427 | 2 | 1511.846 | 1511.847 | 0 | −0.5 | 5280 | 477.5 | 477.5 | 477.5 | 8.06 |
| 950 | K.GYSLPEPIPLLNAK.Q | | 756.427 | 2 | 1511.847 | 1511.847 | 0 | 0.3 | 5280 | 392.8 | 392.8 | 392.8 | 7.71 |
| 964 | K.QILGQLDGGSVAVLPVVDSTNQYLLDRIGELK.S | | 682.977 | 5 | 3410.855 | 3410.853 | 0 | 0.5 | 5294 | 882.2 | 882.2 | 882.2 | 14.48 |
| 964 | K.QILGQLDGGSVAVLPVVDSTNQYLLDRIGELK.S | | 853.469 | 4 | 3410.854 | 3410.853 | 0 | 0.4 | 5294 | 871.4 | 871.4 | 871.4 | 14.48 |
| 964 | K.QILGQLDGGSVAVLPVVDSTNQYLLDRIGELK.S | | 1137.622 | 3 | 3410.852 | 3410.853 | 0 | −0.2 | 5294 | 885.6 | 885.6 | 885.6 | 14.41 |
| 964 | K.QILGQLDGGSVAVLPVVDSTNQYLLDRIGELK.S | | 1137.622 | 3 | 3410.852 | 3410.853 | 0 | 0.4 | 5294 | 869.1 | 869.1 | 869.1 | 14.41 |
| 964 | K.QILGQLDGGSVAVLPVVDSTNQYLLDRIGELK.S | | 1137.622 | 3 | 3410.851 | 3410.853 | 0 | −0.7 | 5294 | 861.5 | 861.5 | 861.5 | 14.41 |
| 964 | K.QILGQLDGGSVAVLPVVDSTNQYLLDRIGELK.S | | 1137.624 | 3 | 3410.857 | 3410.853 | 0 | 1.3 | 5294 | 822.3 | 822.3 | 822.3 | 13.99 |
| 893 | K.QILGQLDGGSVAVLPVVDSTNQYLLDR.I | | 1435.767 | 2 | 2870.526 | 2870.526 | 0 | 0.2 | 5294 | 769.2 | 769.2 | 769.2 | 13.98 |
| 964 | K.QILGQLDGGSVAVLPVVDSTNQYLLDRIGELK.S | | 1137.624 | 3 | 3410.856 | 3410.853 | 0 | 0.9 | 5294 | 769.7 | 769.7 | 769.7 | 12.99 |
| 893 | K.QILGQLDGGSVAVLPVVDSTNQYLLDR.I | | 1435.768 | 2 | 2870.528 | 2870.526 | 0 | 0.7 | 5294 | 714.6 | 714.6 | 714.6 | 12.98 |
| 893 | K.QILGQLDGGSVAVLPVVDSTNQYLLDR.I | | 1435.766 | 2 | 2870.525 | 2870.526 | 0 | −0.2 | 5294 | 701.8 | 701.8 | 701.8 | 12.98 |
| 893 | K.QILGQLDGGSVAVLPVVDSTNQYLLDR.I | | 1435.767 | 2 | 2870.527 | 2870.526 | 0 | 0.5 | 5294 | 697.3 | 697.3 | 697.3 | 11.98 |
| 964 | K.QILGQLDGGSVAVLPVVDSTNQYLLDRIGELK.S | | 853.469 | 4 | 3410.853 | 3410.853 | 0 | 0.1 | 5294 | 737.0 | 737.0 | 737.0 | 11.47 |
| 893 | K.QILGQLDGGSVAVLPVVDSTNQYLLDR.I | | 1435.768 | 2 | 2870.529 | 2870.526 | 0 | 0.9 | 5294 | 634.7 | 634.7 | 634.7 | 10.98 |
| 893 | K.QILGQLDGGSVAVLPVVDSTNQYLLDR.I | | 1435.769 | 2 | 2870.531 | 2870.526 | 0 | 1.7 | 5294 | 618.8 | 618.8 | 618.8 | 10.98 |
| 893 | K.QILGQLDGGSVAVLPVVDSTNQYLLDR.I | | 1435.766 | 2 | 2870.525 | 2870.526 | 0 | −0.2 | 5294 | 603.2 | 603.2 | 603.2 | 10.98 |
| 964 | K.QILGQLDGGSVAVLPVVDSTNQYLLDRIGELK.S | | 853.469 | 4 | 3410.854 | 3410.853 | 0 | 0.3 | 5294 | 673.1 | 673.1 | 673.1 | 10.47 |
| 893 | K.QILGQLDGGSVAVLPVVDSTNQYLLDR.I | | 957.515 | 3 | 2870.529 | 2870.526 | 0 | 1.1 | 5294 | 633.2 | 633.2 | 633.2 | 10.46 |
| 893 | K.QILGQLDGGSVAVLPVVDSTNQYLLDR.I | | 957.514 | 3 | 2870.526 | 2870.526 | 0 | 0.1 | 5294 | 631.7 | 631.7 | 631.7 | 10.46 |
| 893 | K.QILGQLDGGSVAVLPVVDSTNQYLLDR.I | | 957.513 | 3 | 2870.526 | 2870.526 | 0 | −0.1 | 5294 | 618.3 | 618.3 | 618.3 | 10.46 |
| 893 | K.QILGQLDGGSVAVLPVVDSTNQYLLDR.I | | 1435.767 | 2 | 2870.527 | 2870.526 | 0 | 0.2 | 5294 | 597.9 | 597.9 | 597.9 | 9.98 |
| 893 | K.QILGQLDGGSVAVLPVVDSTNQYLLDR.I | | 1435.767 | 2 | 2870.526 | 2870.526 | 0 | 0.0 | 5294 | 594.9 | 594.9 | 594.9 | 9.98 |
| 893 | K.QILGQLDGGSVAVLPVVDSTNQYLLDR.I | | 718.387 | 4 | 2870.527 | 2870.526 | 0 | 0.3 | 5294 | 595.3 | 595.3 | 595.3 | 9.46 |
| 1505 | K.QILGQLDGGSVAVLPVVDSTN[+0.984]QYLLDR.I | N[+1] | 957.842 | 3 | 2871.512 | 2871.510 | 0 | 0.9 | 5294 | 588.8 | 588.8 | 155.0 | 9.46 |
| 893 | K.QILGQLDGGSVAVLPVVDSTNQYLLDR.I | | 718.387 | 4 | 2870.526 | 2870.526 | 0 | 0.1 | 5294 | 576.0 | 576.0 | 576.0 | 9.46 |
| 893 | K.QILGQLDGGSVAVLPVVDSTNQYLLDR.I | | 957.515 | 3 | 2870.530 | 2870.526 | 0 | 1.3 | 5294 | 571.7 | 571.7 | 571.7 | 9.46 |
| 893 | K.QILGQLDGGSVAVLPVVDSTNQYLLDR.I | | 957.513 | 3 | 2870.525 | 2870.526 | 0 | −0.1 | 5294 | 569.4 | 569.4 | 569.4 | 9.46 |
| 893 | K.QILGQLDGGSVAVLPVVDSTNQYLLDR.I | | 957.513 | 3 | 2870.525 | 2870.526 | 0 | 0.2 | 5294 | 597.3 | 597.3 | 597.3 | 8.88 |
| 893 | K.QILGQLDGGSVAVLPVVDSTNQYLLDR.I | | 957.514 | 3 | 2870.526 | 2870.526 | 0 | 0.0 | 5294 | 558.0 | 558.0 | 558.0 | 8.73 |
| 893 | K.QILGQLDGGSVAVLPVVDSTNQYLLDR.I | | 718.387 | 4 | 2870.526 | 2870.526 | 0 | −0.1 | 5294 | 549.0 | 549.0 | 549.0 | 8.73 |
| 893 | K.QILGQLDGGSVAVLPVVDSTNQYLLDR.I | | 957.514 | 3 | 2870.528 | 2870.526 | 0 | 0.8 | 5294 | 529.8 | 529.8 | 529.8 | 8.73 |
| 893 | K.QILGQLDGGSVAVLPVVDSTNQYLLDR.I | | 957.514 | 3 | 2870.529 | 2870.526 | 0 | 1.0 | 5294 | 522.2 | 522.2 | 522.2 | 8.73 |
| 1505 | K.QILGQLDGGSVAVLPVVDSTN[+0.984]QYLLDR.I | N[+1] | 957.842 | 3 | 2871.511 | 2871.510 | 0 | 0.5 | 5294 | 514.7 | 514.7 | 185.6 | 8.55 |
| 893 | K.QILGQLDGGSVAVLPVVDSTNQYLLDR.I | | 957.514 | 3 | 2870.526 | 2870.526 | 0 | 0.1 | 5294 | 510.5 | 510.5 | 510.5 | 8.55 |
| 964 | K.QILGQLDGGSVAVLPVVDSTNQYLLDRIGELK.S | | 1137.625 | 3 | 3410.859 | 3410.853 | 0 | 1.8 | 5294 | 557.5 | 557.5 | 557.5 | 8.26 |
| 893 | K.QILGQLDGGSVAVLPVVDSTNQYLLDR.I | | 957.514 | 3 | 2870.527 | 2870.526 | 0 | 0.4 | 5294 | 521.3 | 521.3 | 521.3 | 8.13 |
| 893 | K.QILGQLDGGSVAVLPVVDSTNQYLLDR.I | | 957.514 | 3 | 2870.527 | 2870.526 | 0 | 0.3 | 5294 | 485.4 | 485.4 | 485.4 | 7.95 |
| 964 | K.QILGQLDGGSVAVLPVVDSTNQYLLDRIGELK.S | | 853.470 | 4 | 3410.857 | 3410.853 | 0 | 1.2 | 5294 | 550.8 | 550.8 | 550.8 | 7.74 |
| 893 | K.QILGQLDGGSVAVLPVVDSTNQYLLDR.I | | 957.513 | 3 | 2870.525 | 2870.526 | 0 | 0.4 | 5294 | 473.2 | 473.2 | 473.2 | 6.92 |
| 1505 | K.QILGQLDGGSVAVLPVVDSTN[+0.984]QYLLDR.I | N[+1] | 958.516 | 3 | 2873.533 | 2871.510 | 2 | 5.8 | 5294 | 474.8 | 474.8 | 474.8 | 6.24 |
| 964 | K.QILGQLDGGSVAVLPVVDSTNQYLLDRIGELK.S | | 853.470 | 4 | 3410.856 | 3410.853 | 0 | 0.9 | 5294 | 428.0 | 428.0 | 428.0 | 6.11 |
| 893 | K.QILGQLDGGSVAVLPVVDSTNQYLLDR.I | | 957.508 | 3 | 2870.508 | 2870.526 | 0 | 6.1 | 5294 | 415.5 | 415.5 | 415.5 | 5.95 |
| 964 | K.QILGQLDGGSVAVLPVVDSTNQYLLDRIGELK.S | | 1137.615 | 3 | 3410.829 | 3410.853 | 0 | −6.9 | 5294 | 551.3 | 551.3 | 551.3 | 5.86 |
| 893 | K.QILGQLDGGSVAVLPVVDSTNQYLLDR.I | | 718.387 | 4 | 2870.526 | 2870.526 | 0 | 0.2 | 5294 | 326.2 | 326.2 | 326.2 | 5.65 |
| 893 | K.QILGQLDGGSVAVLPVVDSTNQYLLDR.I | | 957.850 | 3 | 2871.535 | 2870.526 | 1 | 2.0 | 5294 | 314.1 | 314.1 | 243.0 | 5.56 |
| 964 | K.QILGQLDGGSVAVLPVVDSTNQYLLDRIGELK.S | | 853.461 | 4 | 3410.822 | 3410.853 | 0 | −9.2 | 5294 | 475.2 | 475.2 | 475.2 | 4.77 |
| 1698 | K.SGDAC[+57.021]IAEYQQAGR.G | C[+57] | 763.338 | 2 | 1525.670 | 1525.670 | 0 | 0.3 | 5326 | 741.7 | 741.7 | 741.7 | 12.13 |
| 1711 | K.SGDAC[+57.021]IAEYQQAGRGSR.G | C[+57] | 609.280 | 3 | 1825.825 | 1825.825 | 0 | 0.2 | 5326 | 496.9 | 496.9 | 496.9 | 7.91 |
| 822 | K.RGPAAIGLGPVIGIVMAEALR.K | | 687.738 | 3 | 2061.200 | 2061.200 | 0 | 0.1 | 5364 | 537.1 | 537.1 | 537.1 | 9.25 |
| 822 | K.RGPAAIGLGPVIGIVMAEALR.K | | 687.738 | 3 | 2061.200 | 2061.200 | 0 | 0.1 | 5364 | 432.2 | 432.2 | 432.2 | 7.80 |
| 2620 | R.GPAAIGLGPVIGIVMAEALR.K | | 953.053 | 2 | 1905.099 | 1905.099 | 0 | 0.2 | 5365 | 503.1 | 503.1 | 503.1 | 9.07 |
| 2620 | R.GPAAIGLGPVIGIVMAEALR.K | | 635.705 | 3 | 1905.100 | 1905.099 | 0 | 0.2 | 5365 | 551.8 | 551.8 | 551.8 | 8.73 |
| 919 | R.VKWPNDLYLQDRK.L | | 419.480 | 4 | 1674.896 | 1674.896 | 0 | 0.0 | 5393 | 547.3 | 547.3 | 547.3 | 8.36 |
| 912 | R.VKWPNDLYLQDR.K | | 516.272 | 3 | 1546.801 | 1546.801 | 0 | 0.0 | 5393 | 527.1 | 527.1 | 527.1 | 8.12 |
| 912 | R.VKWPNDLYLQDR.K | | 516.272 | 3 | 1546.801 | 1546.801 | 0 | 0.1 | 5393 | 526.6 | 511.9 | 511.9 | 8.12 |
| 912 | R.VKWPNDLYLQDR.K | | 773.904 | 2 | 1546.801 | 1546.801 | 0 | 0.4 | 5393 | 485.1 | 485.1 | 485.1 | 7.95 |
| 912 | R.VKWPNDLYLQDR.K | | 516.272 | 3 | 1546.801 | 1546.801 | 0 | 0.1 | 5393 | 489.2 | 428.5 | 428.5 | 7.94 |
| 912 | R.VKWPNDLYLQDR.K | | 516.272 | 3 | 1546.802 | 1546.801 | 0 | 0.2 | 5393 | 471.6 | 471.6 | 471.6 | 7.78 |
| 919 | R.VKWPNDLYLQDRK.L | | 558.970 | 3 | 1674.896 | 1674.896 | 0 | −0.3 | 5393 | 552.9 | 552.9 | 552.9 | 7.18 |
| 912 | R.VKWPNDLYLQDR.K | | 773.904 | 2 | 1546.801 | 1546.801 | 0 | 0.3 | 5393 | 450.7 | 363.9 | 363.9 | 6.90 |
| 919 | R.VKWPNDLYLQDRK.L | | 558.970 | 3 | 1674.896 | 1674.896 | 0 | −0.3 | 5393 | 495.7 | 495.7 | 495.7 | 6.71 |
| 912 | R.VKWPNDLYLQDR.K | | 516.606 | 3 | 1547.804 | 1546.801 | 1 | −0.2 | 5393 | 532.6 | 532.6 | 532.6 | 6.45 |
| 857 | R.RVEESVVNQGWITLQEAGINLDRNTLAATLIR.E | | 895.737 | 4 | 3579.927 | 3579.924 | 0 | 0.7 | 5435 | 802.6 | 700.8 | 700.8 | 13.99 |
| 857 | R.RVEESVVNQGWITLQEAGINLDRNTLAATLIR.E | | 895.736 | 4 | 3579.923 | 3579.924 | 0 | 0.3 | 5435 | 836.9 | 795.6 | 795.6 | 13.41 |
| 857 | R.RVEESVVNQGWITLQEAGINLDRNTLAATLIR.E | | 895.736 | 4 | 3579.923 | 3579.924 | 0 | −0.2 | 5435 | 764.5 | 756.6 | 756.6 | 12.41 |
| 857 | R.RVEESVVNQGWITLQEAGINLDRNTLAATLIR.E | | 716.792 | 5 | 3579.931 | 3579.924 | 0 | 2.0 | 5435 | 726.6 | 645.5 | 645.5 | 11.47 |
| 857 | R.RVEESVVNQGWITLQEAGINLDRNTLAATLIR.E | | 895.736 | 4 | 3579.923 | 3579.924 | 0 | 0.3 | 5435 | 681.9 | 660.6 | 660.6 | 10.41 |
| 1292 | R.VEESVVNQGWITLQEAGINLDRNTLAATLIR.E | | 1141.947 | 3 | 3423.827 | 3423.823 | 0 | 1.0 | 5436 | 868.3 | 868.3 | 868.3 | 15.00 |
| 1292 | R.VEESVVNQGWITLQEAGINLDRNTLAATLIR.E | | 856.711 | 4 | 3423.824 | 3423.823 | 0 | 0.3 | 5436 | 771.1 | 771.1 | 771.1 | 12.47 |
| 1292 | R.VEESVVNQGWITLQEAGINLDRNTLAATLIR.E | | 685.571 | 5 | 3423.825 | 3423.823 | 0 | 0.7 | 5436 | 604.0 | 604.0 | 604.0 | 9.47 |
| 2188 | R.NTLAATLIR.E | | 486.795 | 2 | 972.584 | 972.584 | 0 | 0.1 | 5458 | 420.4 | 420.4 | 420.4 | 7.53 |
| 2188 | R.NTLAATLIR.E | | 486.795 | 2 | 972.584 | 972.584 | 0 | 0.1 | 5458 | 423.7 | 423.7 | 423.7 | 7.35 |
| 1793 | R.ELRAALELFEQEGLAPYLPR.W | | 772.752 | 3 | 2316.242 | 2315.239 | 1 | −0.2 | 5467 | 532.6 | 532.6 | 532.6 | 8.97 |
| 1032 | R.AALELFEQEGLAPYLPRWEK.L | | 787.414 | 3 | 2360.228 | 2360.229 | 0 | −0.3 | 5470 | 752.6 | 752.6 | 752.6 | 13.12 |
| 1914 | R.AALELFEQEGLAPYLPR.W | | 959.010 | 2 | 1917.012 | 1917.012 | 0 | 0.0 | 5470 | 467.6 | 467.6 | 467.6 | 8.91 |
| 1914 | R.AALELFEQEGLAPYLPR.W | | 639.676 | 3 | 1917.013 | 1917.012 | 0 | 0.5 | 5470 | 449.3 | 449.3 | 449.3 | 7.50 |
| 1914 | R.AALELFEQEGLAPYLPR.W | | 639.676 | 3 | 1917.013 | 1917.012 | 0 | 0.5 | 5470 | 322.3 | 322.3 | 322.3 | 5.65 |
| 973 | R.WEKLDNFINRPVK.L | | 415.481 | 4 | 1658.901 | 1658.901 | 0 | 0.1 | 5487 | 464.4 | 464.4 | 464.4 | 7.78 |
| 973 | R.WEKLDNFINRPVK.L | | 553.638 | 3 | 1658.900 | 1658.901 | 0 | 0.9 | 5487 | 532.5 | 532.5 | 532.5 | 7.53 |
| 973 | R.WEKLDNFINRPVK.L | | 415.481 | 4 | 1658.902 | 1658.901 | 0 | 0.1 | 5487 | 330.7 | 330.7 | 330.7 | 5.63 |
| 973 | R.WEKLDNFINRPVK.L | | 415.481 | 4 | 1658.901 | 1658.901 | 0 | 0.1 | 5487 | 321.3 | 321.3 | 321.3 | 5.44 |
| 820 | K.LDNFINRPVKLIIGDKEIFGISR.G | | 532.309 | 5 | 2657.514 | 2657.514 | 0 | 0.2 | 5490 | 484.3 | 484.3 | 484.3 | 8.44 |
| 820 | K.LDNFINRPVKLIIGDKEIFGISR.G | | 532.309 | 5 | 2657.515 | 2657.514 | 0 | 0.5 | 5490 | 419.5 | 419.5 | 419.5 | 7.47 |
| 820 | K.LDNFINRPVKLIIGDKEIFGISR.G | | 665.134 | 4 | 2657.515 | 2657.514 | 0 | 0.5 | 5490 | 473.6 | 468.2 | 468.2 | 7.40 |
| 1931 | K.LDNFINRPVK.L | | 405.900 | 3 | 1215.684 | 1215.684 | 0 | 0.0 | 5490 | 404.0 | 404.0 | 404.0 | 7.35 |
| 820 | K.LDNFINRPVKLIIGDKEIFGISR.G | | 665.134 | 4 | 2657.515 | 2657.514 | 0 | 0.5 | 5490 | 423.8 | 423.8 | 423.8 | 7.17 |
| 820 | K.LDNFINRPVKLIIGDKEIFGISR.G | | 665.134 | 4 | 2657.515 | 2657.514 | 0 | 0.6 | 5490 | 417.2 | 417.2 | 417.2 | 7.17 |
| 1931 | K.LDNFINRPVK.L | | 608.346 | 2 | 1215.684 | 1215.684 | 0 | 0.2 | 5490 | 450.4 | 450.4 | 450.4 | 6.99 |
| 1931 | K.LDNFINRPVK.L | | 608.346 | 2 | 1215.684 | 1215.684 | 0 | 0.1 | 5490 | 318.4 | 195.9 | 195.9 | 5.08 |
| 983 | K.LIIGDKEIFGISR.G | | 730.927 | 2 | 1460.847 | 1460.847 | 0 | 0.1 | 5500 | 654.7 | 654.7 | 654.7 | 11.44 |
| 983 | K.LIIGDKEIFGISR.G | | 487.620 | 3 | 1460.847 | 1460.847 | 0 | −0.4 | 5500 | 655.8 | 655.8 | 655.8 | 10.86 |
| 983 | K.LIIGDKEIFGISR.G | | 487.621 | 3 | 1460.847 | 1460.847 | 0 | −0.2 | 5500 | 619.8 | 619.8 | 619.8 | 9.86 |
| 983 | K.LIIGDKEIFGISR.G | | 487.621 | 3 | 1460.847 | 1460.847 | 0 | 0.2 | 5500 | 597.7 | 597.7 | 597.7 | 9.44 |
| 983 | K.LIIGDKEIFGISR.G | | 487.621 | 3 | 1460.847 | 1460.847 | 0 | 0.0 | 5500 | 563.0 | 563.0 | 563.0 | 9.44 |
| 983 | K.LIIGDKEIFGISR.G | | 487.621 | 3 | 1460.848 | 1460.847 | 0 | 0.3 | 5500 | 581.7 | 581.7 | 581.7 | 8.85 |
| 983 | K.LIIGDKEIFGISR.G | | 487.620 | 3 | 1460.845 | 1460.847 | 0 | −1.2 | 5500 | 524.1 | 524.1 | 524.1 | 7.24 |
| 983 | K.LIIGDKEIFGISR.G | | 487.621 | 3 | 1460.847 | 1460.847 | 0 | −0.2 | 5500 | 389.8 | 389.8 | 389.8 | 7.14 |
| 983 | K.LIIGDKEIFGISR.G | | 487.620 | 3 | 1460.846 | 1460.847 | 0 | −0.5 | 5500 | 427.5 | 427.5 | 427.5 | 6.97 |
| 837 | R.GIDKQGALLLEQDGVIKPWMGGEISLR.S | | 975.196 | 3 | 2923.573 | 2923.571 | 0 | 0.7 | 5513 | 886.2 | 886.2 | 886.2 | 15.65 |
| 837 | R.GIDKQGALLLEQDGVIKPWMGGEISLR.S | | 975.196 | 3 | 2923.572 | 2923.571 | 0 | 0.4 | 5513 | 797.6 | 797.6 | 797.6 | 13.70 |
| 837 | R.GIDKQGALLLEQDGVIKPWMGGEISLR.S | | 975.195 | 3 | 2923.571 | 2923.571 | 0 | −0.1 | 5513 | 791.3 | 791.3 | 791.3 | 13.70 |
| 1612 | R.GIDKQGALLLEQDGVIKPWM[+15.995]GGEISLR.S | M[+16] | 980.527 | 3 | 2939.567 | 2939.566 | 0 | 0.3 | 5513 | 791.2 | 791.2 | 791.2 | 13.70 |
| 837 | R.GIDKQGALLLEQDGVIKPWMGGEISLR.S | | 975.529 | 3 | 2924.572 | 2923.571 | 1 | −0.9 | 5513 | 750.2 | 750.2 | 750.2 | 13.12 |
| 837 | R.GIDKQGALLLEQDGVIKPWMGGEISLR.S | | 731.648 | 4 | 2923.571 | 2923.571 | 0 | 0.0 | 5513 | 722.5 | 722.5 | 722.5 | 12.70 |
| 837 | R.GIDKQGALLLEQDGVIKPWMGGEISLR.S | | 731.648 | 4 | 2923.572 | 2923.571 | 0 | 0.2 | 5513 | 710.8 | 710.8 | 710.8 | 12.70 |
| 837 | R.GIDKQGALLLEQDGVIKPWMGGEISLR.S | | 731.648 | 4 | 2923.571 | 2923.571 | 0 | 0.0 | 5513 | 701.0 | 701.0 | 701.0 | 12.70 |
| 837 | R.GIDKQGALLLEQDGVIKPWMGGEISLR.S | | 731.649 | 4 | 2923.574 | 2923.571 | 0 | 1.0 | 5513 | 695.1 | 695.1 | 695.1 | 11.70 |
| 1612 | R.GIDKQGALLLEQDGVIKPWM[+15.995]GGEISLR.S | M[+16] | 735.647 | 4 | 2939.567 | 2939.566 | 0 | 0.2 | 5513 | 687.5 | 687.5 | 687.5 | 11.70 |
| 837 | R.GIDKQGALLLEQDGVIKPWMGGEISLR.S | | 731.649 | 4 | 2923.574 | 2923.571 | 0 | 0.9 | 5513 | 684.5 | 684.5 | 684.5 | 11.70 |
| 837 | R.GIDKQGALLLEQDGVIKPWMGGEISLR.S | | 731.649 | 4 | 2923.572 | 2923.571 | 0 | 0.3 | 5513 | 683.9 | 683.9 | 683.9 | 11.70 |
| 837 | R.GIDKQGALLLEQDGVIKPWMGGEISLR.S | | 731.649 | 4 | 2923.572 | 2923.571 | 0 | 0.3 | 5513 | 682.1 | 682.1 | 682.1 | 11.70 |
| 837 | R.GIDKQGALLLEQDGVIKPWMGGEISLR.S | | 975.195 | 3 | 2923.571 | 2923.571 | 0 | −0.1 | 5513 | 671.7 | 671.7 | 671.7 | 11.70 |
| 837 | R.GIDKQGALLLEQDGVIKPWMGGEISLR.S | | 731.648 | 4 | 2923.571 | 2923.571 | 0 | 0.1 | 5513 | 658.3 | 658.3 | 658.3 | 11.70 |
| 837 | R.GIDKQGALLLEQDGVIKPWMGGEISLR.S | | 731.648 | 4 | 2923.571 | 2923.571 | 0 | −0.2 | 5513 | 658.1 | 658.1 | 658.1 | 11.70 |
| 837 | R.GIDKQGALLLEQDGVIKPWMGGEISLR.S | | 731.648 | 4 | 2923.572 | 2923.571 | 0 | 0.2 | 5513 | 657.8 | 657.8 | 657.8 | 11.70 |
| 837 | R.GIDKQGALLLEQDGVIKPWMGGEISLR.S | | 731.648 | 4 | 2923.572 | 2923.571 | 0 | 0.2 | 5513 | 657.7 | 657.7 | 657.7 | 11.70 |
| 837 | R.GIDKQGALLLEQDGVIKPWMGGEISLR.S | | 731.648 | 4 | 2923.571 | 2923.571 | 0 | 0.0 | 5513 | 654.8 | 654.8 | 654.8 | 11.70 |
| 837 | R.GIDKQGALLLEQDGVIKPWMGGEISLR.S | | 975.195 | 3 | 2923.570 | 2923.571 | 0 | −0.3 | 5513 | 698.8 | 698.8 | 698.8 | 11.12 |
| 1612 | R.GIDKQGALLLEQDGVIKPWM[+15.995]GGEISLR.SM[+16] | | 735.647 | 4 | 2939.564 | 2939.566 | 0 | −0.6 | 5513 | 659.6 | 659.6 | 659.6 | 11.12 |
| 837 | R.GIDKQGALLLEQDGVIKPWMGGEISLR.S | | 731.648 | 4 | 2923.568 | 2923.571 | 0 | −1.0 | 5513 | 654.0 | 654.0 | 654.0 | 11.12 |
| 837 | R.GIDKQGALLLEQDGVIKPWMGGEISLR.S | | 975.196 | 3 | 2923.572 | 2923.571 | 0 | 0.4 | 5513 | 649.9 | 649.9 | 649.9 | 10.70 |
| 1612 | R.GIDKQGALLLEQDGVIKPWM[+15.995]GGEISLR.S | M[+16] | 735.647 | 4 | 2939.568 | 2939.566 | 0 | 0.7 | 5513 | 649.4 | 649.4 | 649.4 | 10.70 |
| 837 | R.GIDKQGALLLEQDGVIKPWMGGEISLR.S | | 731.648 | 4 | 2923.571 | 2923.571 | 0 | −0.1 | 5513 | 648.3 | 648.3 | 648.3 | 10.70 |
| 837 | R.GIDKQGALLLEQDGVIKPWMGGEISLR.S | | 731.649 | 4 | 2923.574 | 2923.571 | 0 | 0.8 | 5513 | 644.5 | 644.5 | 644.5 | 10.70 |
| 837 | R.GIDKQGALLLEQDGVIKPWMGGEISLR.S | | 731.648 | 4 | 2923.571 | 2923.571 | 0 | 0.1 | 5513 | 641.7 | 641.7 | 641.7 | 10.70 |
| 837 | R.GIDKQGALLLEQDGVIKPWMGGEISLR.S | | 731.649 | 4 | 2923.573 | 2923.571 | 0 | 0.8 | 5513 | 639.1 | 639.1 | 639.1 | 10.70 |
| 837 | R.GIDKQGALLLEQDGVIKPWMGGEISLR.S | | 731.649 | 4 | 2923.572 | 2923.571 | 0 | 0.3 | 5513 | 632.3 | 632.3 | 632.3 | 10.70 |
| 837 | R.GIDKQGALLLEQDGVIKPWMGGEISLR.S | | 731.899 | 4 | 2924.575 | 2923.571 | 1 | 0.4 | 5513 | 631.7 | 631.7 | 631.7 | 10.70 |
| 837 | R.GIDKQGALLLEQDGVIKPWMGGEISLR.S | | 731.899 | 4 | 2924.576 | 2923.571 | 1 | 0.5 | 5513 | 631.1 | 631.1 | 631.1 | 10.70 |
| 837 | R.GIDKQGALLLEQDGVIKPWMGGEISLR.S | | 731.649 | 4 | 2923.574 | 2923.571 | 0 | 1.0 | 5513 | 627.7 | 627.7 | 627.7 | 10.70 |
| 837 | R.GIDKQGALLLEQDGVIKPWMGGEISLR.S | | 731.649 | 4 | 2923.573 | 2923.571 | 0 | 0.5 | 5513 | 622.8 | 622.8 | 622.8 | 10.70 |
| 837 | R.GIDKQGALLLEQDGVIKPWMGGEISLR.S | | 731.649 | 4 | 2923.574 | 2923.571 | 0 | 1.0 | 5513 | 619.4 | 619.4 | 619.4 | 10.70 |
| 837 | R.GIDKQGALLLEQDGVIKPWMGGEISLR.S | | 731.649 | 4 | 2923.573 | 2923.571 | 0 | 0.5 | 5513 | 616.3 | 616.3 | 616.3 | 10.70 |
| 837 | R.GIDKQGALLLEQDGVIKPWMGGEISLR.S | | 731.649 | 4 | 2923.573 | 2923.571 | 0 | 0.7 | 5513 | 613.5 | 613.5 | 613.5 | 10.70 |
| 837 | R.GIDKQGALLLEQDGVIKPWMGGEISLR.S | | 731.649 | 4 | 2923.573 | 2923.571 | 0 | 0.6 | 5513 | 604.6 | 604.6 | 604.6 | 10.70 |
| 837 | R.GIDKQGALLLEQDGVIKPWMGGEISLR.S | | 1462.288 | 2 | 2923.569 | 2923.571 | 0 | −0.8 | 5513 | 670.6 | 670.6 | 670.6 | 9.70 |
| 837 | R.GIDKQGALLLEQDGVIKPWMGGEISLR.S | | 731.649 | 4 | 2923.573 | 2923.571 | 0 | 0.8 | 5513 | 596.6 | 596.6 | 596.6 | 9.70 |
| 837 | R.GIDKQGALLLEQDGVIKPWMGGEISLR.S | | 731.649 | 4 | 2923.573 | 2923.571 | 0 | 0.8 | 5513 | 593.6 | 593.6 | 593.6 | 9.70 |
| 837 | R.GIDKQGALLLEQDGVIKPWMGGEISLR.S | | 731.649 | 4 | 2923.574 | 2923.571 | 0 | 1.1 | 5513 | 588.5 | 588.5 | 588.5 | 9.70 |
| 837 | R.GIDKQGALLLEQDGVIKPWMGGEISLR.S | | 731.648 | 4 | 2923.571 | 2923.571 | 0 | 0.1 | 5513 | 577.6 | 577.6 | 577.6 | 9.70 |
| 1612 | R.GIDKQGALLLEQDGVIKPWM[+15.995]GGEISLR.S | M[+16] | 735.647 | 4 | 2939.568 | 2939.566 | 0 | 0.6 | 5513 | 577.6 | 577.6 | 577.6 | 9.70 |
| 837 | R.GIDKQGALLLEQDGVIKPWMGGEISLR.S | | 731.649 | 4 | 2923.574 | 2923.571 | 0 | 0.9 | 5513 | 571.5 | 571.5 | 571.5 | 9.70 |
| 837 | R.GIDKQGALLLEQDGVIKPWMGGEISLR.S | | 731.649 | 4 | 2923.572 | 2923.571 | 0 | 0.4 | 5513 | 559.7 | 559.7 | 559.7 | 8.97 |
| 837 | R.GIDKQGALLLEQDGVIKPWMGGEISLR.S | | 731.648 | 4 | 2923.571 | 2923.571 | 0 | 0.1 | 5513 | 554.8 | 554.8 | 554.8 | 8.97 |
| 837 | R.GIDKQGALLLEQDGVIKPWMGGEISLR.S | | 731.649 | 4 | 2923.572 | 2923.571 | 0 | 0.4 | 5513 | 553.6 | 553.6 | 553.6 | 8.97 |
| 837 | R.GIDKQGALLLEQDGVIKPWMGGEISLR.S | | 731.648 | 4 | 2923.571 | 2923.571 | 0 | 0.0 | 5513 | 546.6 | 546.6 | 546.6 | 8.97 |
| 837 | R.GIDKQGALLLEQDGVIKPWMGGEISLR.S | | 731.649 | 4 | 2923.573 | 2923.571 | 0 | 0.5 | 5513 | 530.9 | 530.9 | 530.9 | 8.97 |
| 1612 | R.GIDKQGALLLEQDGVIKPWM[+15.995]GGEISLR.S | M[+16] | 735.647 | 4 | 2939.567 | 2939.566 | 0 | 0.3 | 5513 | 521.9 | 521.9 | 521.9 | 8.97 |
| 837 | R.GIDKQGALLLEQDGVIKPWMGGEISLR.S | | 731.649 | 4 | 2923.574 | 2923.571 | 0 | 1.0 | 5513 | 519.7 | 519.7 | 519.7 | 8.79 |
| 1612 | R.GIDKQGALLLEQDGVIKPWM[+15.995]GGEISLR.S | M[+16] | 980.527 | 3 | 2939.566 | 2939.566 | 0 | 0.1 | 5513 | 514.2 | 514.2 | 514.2 | 8.79 |
| 837 | R.GIDKQGALLLEQDGVIKPWMGGEISLR.S | | 731.649 | 4 | 2923.572 | 2923.571 | 0 | 0.4 | 5513 | 485.9 | 485.9 | 485.9 | 8.79 |
| 837 | R.GIDKQGALLLEQDGVIKPWMGGEISLR.S | | 731.649 | 4 | 2923.572 | 2923.571 | 0 | 0.4 | 5513 | 522.0 | 522.0 | 522.0 | 8.38 |
| 837 | R.GIDKQGALLLEQDGVIKPWMGGEISLR.S | | 731.648 | 4 | 2923.572 | 2923.571 | 0 | 0.2 | 5513 | 516.1 | 516.1 | 516.1 | 8.20 |
| 837 | R.GIDKQGALLLEQDGVIKPWMGGEISLR.S | | 731.649 | 4 | 2923.574 | 2923.571 | 0 | 1.0 | 5513 | 509.6 | 509.6 | 509.6 | 8.20 |
| 837 | R.GIDKQGALLLEQDGVIKPWMGGEISLR.S | | 731.649 | 4 | 2923.573 | 2923.571 | 0 | 0.5 | 5513 | 481.0 | 481.0 | 481.0 | 8.20 |
| 837 | R.GIDKQGALLLEQDGVIKPWMGGEISLR.S | | 975.196 | 3 | 2923.574 | 2923.571 | 0 | 0.9 | 5513 | 554.8 | 554.8 | 554.8 | 8.09 |
| 837 | R.GIDKQGALLLEQDGVIKPWMGGEISLR.S | | 975.195 | 3 | 2923.571 | 2923.571 | 0 | −0.1 | 5513 | 512.5 | 512.5 | 512.5 | 7.91 |
| 837 | R.GIDKQGALLLEQDGVIKPWMGGEISLR.S | | 731.649 | 4 | 2923.573 | 2923.571 | 0 | 0.6 | 5513 | 486.9 | 486.9 | 486.9 | 7.91 |
| 837 | R.GIDKQGALLLEQDGVIKPWMGGEISLR.S | | 731.649 | 4 | 2923.574 | 2923.571 | 0 | 1.0 | 5513 | 436.5 | 436.5 | 436.5 | 7.81 |
| 837 | R.GIDKQGALLLEQDGVIKPWMGGEISLR.S | | 731.648 | 4 | 2923.572 | 2923.571 | 0 | 0.3 | 5513 | 444.4 | 365.0 | 365.0 | 7.75 |
| 1612 | R.GIDKQGALLLEQDGVIKPWM[+15.995]GGEISLR.S | M[+16] | 588.720 | 5 | 2939.568 | 2939.566 | 0 | 0.8 | 5513 | 463.2 | 463.2 | 463.2 | 7.52 |
| 837 | R.GIDKQGALLLEQDGVIKPWMGGEISLR.S | | 731.648 | 4 | 2923.571 | 2923.571 | 0 | −0.2 | 5513 | 438.0 | 438.0 | 438.0 | 7.52 |
| 837 | R.GIDKQGALLLEQDGVIKPWMGGEISLR.S | | 731.649 | 4 | 2923.572 | 2923.571 | 0 | 0.3 | 5513 | 431.5 | 431.5 | 431.5 | 7.52 |
| 837 | R.GIDKQGALLLEQDGVIKPWMGGEISLR.S | | 731.649 | 4 | 2923.573 | 2923.571 | 0 | 0.5 | 5513 | 373.2 | 373.2 | 373.2 | 7.40 |
| 837 | R.GIDKQGALLLEQDGVIKPWMGGEISLR.S | | 975.195 | 3 | 2923.571 | 2923.571 | 0 | 0.1 | 5513 | 434.8 | 434.8 | 434.8 | 7.33 |
| 837 | R.GIDKQGALLLEQDGVIKPWMGGEISLR.S | | 731.899 | 4 | 2924.572 | 2923.571 | 1 | 0.8 | 5513 | 488.7 | 488.7 | 488.7 | 7.32 |
| 837 | R.GIDKQGALLLEQDGVIKPWMGGEISLR.S | | 731.900 | 4 | 2924.578 | 2923.571 | 1 | 1.4 | 5513 | 378.8 | 378.8 | 378.8 | 7.22 |
| 837 | R.GIDKQGALLLEQDGVIKPWMGGEISLR.S | | 975.530 | 3 | 2924.577 | 2923.571 | 1 | 0.7 | 5513 | 360.8 | 360.8 | 360.8 | 7.22 |
| 837 | R.GIDKQGALLLEQDGVIKPWMGGEISLR.S | | 731.642 | 4 | 2923.545 | 2923.571 | 0 | 8.9 | 5513 | 534.8 | 534.8 | 534.8 | 6.81 |
| 837 | R.GIDKQGALLLEQDGVIKPWMGGEISLR.S | | 731.649 | 4 | 2923.574 | 2923.571 | 0 | 1.2 | 5513 | 357.1 | 357.1 | 357.1 | 5.70 |
| 837 | R.GIDKQGALLLEQDGVIKPWMGGEISLR.S | | 731.648 | 4 | 2923.571 | 2923.571 | 0 | 0.0 | 5513 | 328.9 | 328.9 | 328.9 | 5.70 |
| 837 | R.GIDKQGALLLEQDGVIKPWMGGEISLR.S | | 731.899 | 4 | 2924.574 | 2923.571 | 1 | 0.3 | 5513 | 311.1 | 311.1 | 311.1 | 4.50 |
| 1659 | K.QGALLLEQDGVIKPWM[+15.995]GGEISLR.S | M[+16] | 842.785 | 3 | 2526.339 | 2526.339 | 0 | 0.3 | 5517 | 792.1 | 792.1 | 792.1 | 13.98 |
| 915 | K.QGALLLEQDGVIKPWMGGEISLR.S | | 1256.677 | 2 | 2512.347 | 2510.344 | 2 | −1.3 | 5517 | 457.2 | 457.2 | 457.2 | 6.65 |
| 915 | K.QGALLLEQDGVIKPWMGGEISLR.S | | 837.452 | 3 | 2510.342 | 2510.344 | 0 | 0.7 | 5517 | 325.0 | 300.0 | 300.0 | 5.19 |
| 864 | R.SAEKLQLPPLER.L | | 690.896 | 2 | 1380.785 | 1380.785 | 0 | 0.1 | 5540 | 670.5 | 670.5 | 670.5 | 11.44 |
| 864 | R.SAEKLQLPPLER.L | | 690.896 | 2 | 1380.784 | 1380.785 | 0 | −0.3 | 5540 | 570.3 | 570.3 | 570.3 | 8.86 |
| 864 | R.SAEKLQLPPLER.L | | 690.896 | 2 | 1380.785 | 1380.785 | 0 | 0.1 | 5540 | 486.0 | 486.0 | 486.0 | 8.53 |
| 864 | R.SAEKLQLPPLER.L | | 690.896 | 2 | 1380.784 | 1380.785 | 0 | −0.3 | 5540 | 599.4 | 599.4 | 599.4 | 8.26 |
| 864 | R.SAEKLQLPPLER.L | | 460.933 | 3 | 1380.785 | 1380.785 | 0 | 0.1 | 5540 | 475.5 | 475.5 | 475.5 | 7.78 |
| 864 | R.SAEKLQLPPLER.L | | 460.933 | 3 | 1380.784 | 1380.785 | 0 | −0.1 | 5540 | 448.6 | 448.6 | 448.6 | 7.78 |
| 864 | R.SAEKLQLPPLER.L | | 460.933 | 3 | 1380.785 | 1380.785 | 0 | 0.0 | 5540 | 482.8 | 482.8 | 482.8 | 7.64 |
| 864 | R.SAEKLQLPPLER.L | | 460.933 | 3 | 1380.785 | 1380.785 | 0 | 0.2 | 5540 | 435.5 | 435.5 | 435.5 | 7.55 |
| 4650 | R.SAEKLQLPPLERLTLD.- | | 912.017 | 2 | 1823.027 | 1823.027 | 0 | 0.1 | 5540 | 420.5 | 420.5 | 420.5 | 7.20 |
| 864 | R.SAEKLQLPPLER.L | | 460.933 | 3 | 1380.784 | 1380.785 | 0 | −0.2 | 5540 | 399.6 | 399.6 | 399.6 | 7.14 |
| 4650 | R.SAEKLQLPPLERLTLD.- | | 608.347 | 3 | 1823.027 | 1823.027 | 0 | 0.0 | 5540 | 379.8 | 379.8 | 379.8 | 6.80 |
| 864 | R.SAEKLQLPPLER.L | | 460.933 | 3 | 1380.784 | 1380.785 | 0 | −0.2 | 5540 | 386.8 | 386.8 | 386.8 | 6.56 |
| 1905 | K.LQLPPLER.L | | 483.293 | 2 | 965.578 | 965.578 | 0 | −0.1 | 5544 | 417.5 | 417.5 | 417.5 | 7.35 |
| 1905 | K.LQLPPLER.L | | 483.293 | 2 | 965.578 | 965.578 | 0 | 0.2 | 5544 | 413.8 | 413.8 | 413.8 | 7.35 |
| 1905 | K.LQLPPLER.L | | 483.293 | 2 | 965.578 | 965.578 | 0 | 0.0 | 5544 | 398.8 | 398.8 | 398.8 | 7.23 |

TABLE 9
RNF213 Peptides Rep 3

| | | | | | | | | | Start- | | | | |
|---|---|---|---|---|---|---|---|---|---|---|---|---|---|
| SEQ | | Modifi- | | | | Calc. | Off- | Mass | ing | | | | |
| ID | Peptide | cation | Observed | | Observed | mass | by-x | error | posi- | | | Delta | \|Log |
| NO: | <ProteinMetrics Confidential> | Type(s) | m/z | Z | (M + H) | (M + H) | error | (ppm) | tion | Score | Delta | Mod | Prob\| |
| 880 | K.ASWTVQESK.K | | 518.259 | 2 | 1035.510 | 1035.511 | 0 | −0.1 | 81 | 501.6 | 501.6 | 501.6 | 8.01 |
| 880 | K.ASWTVQESK.K | | 518.259 | 2 | 1035.510 | 1035.511 | 0 | 0.4 | 81 | 426.4 | 426.4 | 426.4 | 7.44 |
| 884 | R.GLSQEGTGPPTSAGEGHSR.T | | 608.954 | 3 | 1824.849 | 1824.847 | 0 | 0.9 | 215 | 842.0 | 842.0 | 842.0 | 14.78 |
| 884 | R.GLSQEGTGPPTSAGEGHSR.T | | 608.954 | 3 | 1824.848 | 1824.847 | 0 | 0.3 | 215 | 736.0 | 736.0 | 736.0 | 12.79 |
| 884 | R.GLSQEGTGPPTSAGEGHSR.T | | 608.954 | 3 | 1824.847 | 1824.847 | 0 | −0.2 | 215 | 700.1 | 700.1 | 700.1 | 12.79 |
| 884 | R.GLSQEGTGPPTSAGEGHSR.T | | 912.927 | 2 | 1824.848 | 1824.847 | 0 | 0.2 | 215 | 684.5 | 684.5 | 684.5 | 11.79 |
| 884 | R.GLSQEGTGPPTSAGEGHSR.T | | 608.955 | 3 | 1824.849 | 1824.847 | 0 | 1.0 | 215 | 662.6 | 662.6 | 662.6 | 11.79 |
| 884 | R.GLSQEGTGPPTSAGEGHSR.T | | 608.954 | 3 | 1824.846 | 1824.847 | 0 | −0.4 | 215 | 655.5 | 655.5 | 655.5 | 11.79 |
| 1079 | R.GLSQEGTGPPTSAGEGHSRTEDAAQELLLPESK.G | | 838.160 | 4 | 3349.616 | 3349.614 | 0 | 0.7 | 215 | 659.5 | 659.5 | 659.5 | 10.85 |
| 1079 | R.GLSQEGTGPPTSAGEGHSRTEDAAQELLLPESK.G | | 1117.210 | 3 | 3349.614 | 3349.614 | 0 | 0.1 | 215 | 654.9 | 654.9 | 654.9 | 10.85 |
| 884 | R.GLSQEGTGPPTSAGEGHSR.T | | 456.967 | 4 | 1824.847 | 1824.847 | 0 | −0.1 | 215 | 562.8 | 516.7 | 516.7 | 9.25 |
| 1079 | R.GLSQEGTGPPTSAGEGHSRTEDAAQELLLPESK.G | | 838.159 | 4 | 3349.614 | 3349.614 | 0 | −0.2 | 215 | 596.8 | 596.8 | 596.8 | 8.85 |
| 1467 | R.GLSQEGTGPPTSAGEGHS[+79.966]RTEDAAQELLLPESK.G | S[+80] | 858.401 | 4 | 3430.583 | 3429.581 | 1 | −0.3 | 215 | 588.3 | 588.3 | 22.6 | 8.31 |
| 1079 | R.GLSQEGTGPPTSAGEGHSRTEDAAQELLLPESK.G | | 838.159 | 4 | 3349.613 | 3349.614 | 0 | −0.4 | 215 | 506.4 | 506.4 | 506.4 | 8.05 |
| 1079 | R.GLSQEGTGPPTSAGEGHSRTEDAAQELLLPESK.G | | 1117.209 | 3 | 3349.613 | 3349.614 | 0 | −0.5 | 215 | 568.7 | 568.7 | 568.7 | 7.94 |
| 884 | R.GLSQEGTGPPTSAGEGHSR.T | | 608.954 | 3 | 1824.847 | 1824.847 | 0 | −0.1 | 215 | 361.6 | 361.6 | 361.6 | 7.73 |
| 1079 | R.GLSQEGTGPPTSAGEGHSRTEDAAQELLLPESK.G | | 670.729 | 5 | 3349.616 | 3349.614 | 0 | 0.5 | 215 | 517.4 | 517.4 | 517.4 | 6.74 |
| 884 | R.GLSQEGTGPPTSAGEGHSR.T | | 609.282 | 3 | 1825.831 | 1824.847 | 1 | −10.4 | 215 | 496.2 | 496.2 | 496.2 | 6.68 |
| 1079 | R.GLSQEGTGPPTSAGEGHSRTEDAAQELLLPESK.G | | 670.729 | 5 | 3349.616 | 3349.614 | 0 | 0.4 | 215 | 459.8 | 459.8 | 459.8 | 6.53 |
| 884 | R.GLSQEGTGPPTSAGEGHSR.T | | 608.954 | 3 | 1824.848 | 1824.847 | 0 | 0.4 | 215 | 346.7 | 346.7 | 346.7 | 6.45 |
| 1079 | R.GLSQEGTGPPTSAGEGHSRTEDAAQELLLPESK.G | | 670.729 | 5 | 3349.616 | 3349.614 | 0 | 0.7 | 215 | 371.2 | 371.2 | 371.2 | 6.06 |
| 1079 | R.GLSQEGTGPPTSAGEGHSRTEDAAQELLLPESK.G | | 838.158 | 4 | 3349.609 | 3349.614 | 0 | −1.5 | 215 | 365.1 | 365.1 | 365.1 | 5.88 |
| 1079 | R.GLSQEGTGPPTSAGEGHSRTEDAAQELLLPESK.G | | 670.729 | 5 | 3349.616 | 3349.614 | 0 | 0.5 | 215 | 400.3 | 345.0 | 345.0 | 4.99 |
| 842 | R.GLSQEGTGPPTSAGEGHSRTEDAAQELLLPESKGGSSEPGTELQ | | 970.894 | 7 | 6790.217 | 6790.214 | 0 | 0.3 | 215 | 511.1 | 511.1 | 511.1 | 4.91 |
| | TTEQQAGASASMAVDAVAEPANAVK.G | | | | | | | | | | | | |
| 1185 | R.TEDAAQELLLPESK.G | | 772.396 | 2 | 1543.785 | 1543.785 | 0 | 0.1 | 234 | 647.8 | 590.0 | 590.0 | 10.58 |
| 2915 | R.TEDAAQELLLPESKGGSSEPGTELQTTEQQAGASASMAVDAV | | 1246.851 | 4 | 4984.382 | 4984.385 | 0 | −0.6 | 234 | 745.7 | 745.7 | 745.7 | 10.01 |
| | AEPANAVK.G | | | | | | | | | | | | |
| 1185 | R.TEDAAQELLLPESK.G | | 772.396 | 2 | 1543.785 | 1543.785 | 0 | 0.2 | 234 | 582.0 | 534.1 | 534.1 | 9.58 |
| 1185 | R.TEDAAQELLLPESK.G | | 772.396 | 2 | 1543.785 | 1543.785 | 0 | −0.1 | 234 | 468.4 | 326.1 | 326.1 | 7.40 |
| 2915 | R.TEDAAQELLLPESKGGSSEPGTELQTTEQQAGASASMAVDAV | | 997.883 | 5 | 4985.387 | 4984.385 | 1 | −0.4 | 234 | 556.5 | 556.5 | 305.8 | 6.29 |
| | AEPANAVK.G | | | | | | | | | | | | |
| 1185 | R.TEDAAQELLLPESK.G | | 515.267 | 3 | 1543.786 | 1543.785 | 0 | 0.4 | 234 | 385.5 | 282.8 | 282.8 | 5.43 |
| 2915 | R.TEDAAQELLLPESKGGSSEPGTELQTTEQQAGASASMAVDAV | | 997.681 | 5 | 4984.377 | 4984.385 | 0 | −1.6 | 234 | 513.8 | 513.8 | 513.8 | 4.78 |
| | AEPANAVK.G | | | | | | | | | | | | |
| 1078 | K.GGSSEPGTELQTTEQQAGASASMAVDAVAEPANAVKGAGK.E | | 1258.269 | 3 | 3772.793 | 3772.793 | 0 | −0.1 | 248 | 949.8 | 949.8 | 949.8 | 15.95 |
| 1078 | K.GGSSEPGTELQTTEQQAGASASMAVDAVAEPANAVKGAGK.E | | 943.955 | 4 | 3772.797 | 3772.793 | 0 | 1.2 | 248 | 917.6 | 917.6 | 917.6 | 15.35 |
| 1078 | K.GGSSEPGTELQTTEQQAGASASMAVDAVAEPANAVKGAGK.E | | 1258.603 | 3 | 3773.794 | 3772.793 | 1 | −0.5 | 248 | 904.3 | 904.3 | 638.2 | 14.95 |
| 1078 | K.GGSSEPGTELQTTEQQAGASASMAVDAVAEPANAVKGAGK.E | | 1258.269 | 3 | 3772.793 | 3772.793 | 0 | −0.1 | 248 | 895.4 | 895.4 | 895.4 | 14.84 |
| 1078 | K.GGSSEPGTELQTTEQQAGASASMAVDAVAEPANAVKGAGK.E | | 943.954 | 4 | 3772.793 | 3772.793 | 0 | 0.1 | 248 | 771.0 | 771.0 | 771.0 | 12.32 |
| 1210 | K.GGSSEPGTELQTTEQQAGASASMAVDAVAEPANAVKGAGKE | | 1040.998 | 4 | 4160.969 | 4160.971 | 0 | −0.5 | 248 | 845.3 | 796.8 | 796.8 | 12.22 |
| | MK.E | | | | | | | | | | | | |
| 1210 | K.GGSSEPGTELQTTEQQAGASASMAVDAVAEPANAVKGAGKE | | 1040.998 | 4 | 4160.971 | 4160.971 | 0 | −0.1 | 248 | 784.9 | 725.5 | 725.5 | 12.13 |
| | MK.E | | | | | | | | | | | | |
| 1066 | K.GGSSEPGTELQTTEQQAGASASMAVDAVAEPANAVK.G | | 1154.213 | 3 | 3460.623 | 3459.618 | 1 | 0.5 | 248 | 707.8 | 585.5 | 308.2 | 11.58 |
| 1567 | K.GGSSEPGTELQTTEQQAGASASM[+15.995]AVDAVAEPANAVK | M[+16] | 1159.211 | 3 | 3475.617 | 3475.613 | 0 | 1.2 | 248 | 703.9 | 703.9 | 703.9 | 11.58 |
| | .G | | | | | | | | | | | | |
| 1483 | K.GGSSEPGTELQTTEQQAGASASMAVDAVAEPAN[+0.984]AVK | N[+1] | 1041.497 | 4 | 4162.964 | 4161.955 | 1 | 1.4 | 248 | 738.3 | 738.3 | 206.2 | 11.13 |
| | GAGKEMK.E | | | | | | | | | | | | |
| 1066 | K.GGSSEPGTELQTTEQQAGASASMAVDAVAEPANAVK.G | | 865.661 | 4 | 3459.621 | 3459.618 | 0 | 0.8 | 248 | 681.9 | 681.9 | 681.9 | 10.58 |
| 1567 | K.GGSSEPGTELQTTEQQAGASASM[+15.995]AVDAVAEPANAVK | M[+16] | 1159.210 | 3 | 3475.615 | 3475.613 | 0 | 0.5 | 248 | 669.1 | 669.1 | 669.1 | 10.58 |
| | .G | | | | | | | | | | | | |
| 1066 | K.GGSSEPGTELQTTEQQAGASASMAVDAVAEPANAVK.G | | 1153.877 | 3 | 3459.617 | 3459.618 | 0 | −0.3 | 248 | 651.4 | 651.4 | 651.4 | 10.58 |
| 1066 | K.GGSSEPGTELQTTEQQAGASASMAVDAVAEPANAVK.G | | 865.660 | 4 | 3459.620 | 3459.618 | 0 | 0.4 | 248 | 637.0 | 637.0 | 637.0 | 9.58 |
| 1066 | K.GGSSEPGTELQTTEQQAGASASMAVDAVAEPANAVK.G | | 865.660 | 4 | 3459.619 | 3459.618 | 0 | 0.3 | 248 | 604.4 | 604.4 | 604.4 | 9.58 |
| 1210 | K.GGSSEPGTELQTTEQQAGASASMAVDAVAEPANAVKGAGKE | | 833.202 | 5 | 4161.979 | 4160.971 | 1 | 1.0 | 248 | 671.7 | 671.7 | 231.8 | 9.04 |
| | MK.E | | | | | | | | | | | | |
| 1066 | K.GGSSEPGTELQTTEQQAGASASMAVDAVAEPANAVK.G | | 865.660 | 4 | 3459.618 | 3459.618 | 0 | −0.1 | 248 | 622.5 | 622.5 | 622.5 | 9.03 |
| 1567 | K.GGSSEPGTELQTTEQQAGASASM[+15.995]AVDAVAEPANAVK | M[+16] | 869.659 | 4 | 3475.613 | 3475.613 | 0 | 0.0 | 248 | 600.4 | 600.4 | 600.4 | 9.03 |
| | .G | | | | | | | | | | | | |
| 1078 | K.GGSSEPGTELQTTEQQAGASASMAVDAVAEPANAVKGAGK.E | | 755.365 | 5 | 3772.794 | 3772.793 | 0 | 0.3 | 248 | 611.6 | 604.2 | 604.2 | 8.77 |
| 1567 | K.GGSSEPGTELQTTEQQAGASASM[+15.995]AVDAVAEPANAVK | M[+16] | 1159.542 | 3 | 3476.612 | 3475.613 | 1 | −1.1 | 248 | 641.7 | 641.7 | 529.2 | 8.66 |
| | .G | | | | | | | | | | | | |
| 1066 | K.GGSSEPGTELQTTEQQAGASASMAVDAVAEPANAVK.G | | 1153.878 | 3 | 3459.620 | 3459.618 | 0 | 0.6 | 248 | 592.6 | 592.6 | 592.6 | 8.58 |
| 1066 | K.GGSSEPGTELQTTEQQAGASASMAVDAVAEPANAVK.G | | 1153.879 | 3 | 3459.623 | 3459.618 | 0 | 1.4 | 248 | 540.2 | 540.2 | 540.2 | 7.90 |
| 1066 | K.GGSSEPGTELQTTEQQAGASASMAVDAVAEPANAVK.G | | 1153.877 | 3 | 3459.617 | 3459.618 | 0 | −0.3 | 248 | 536.0 | 536.0 | 536.0 | 7.35 |
| 1210 | K.GGSSEPGTELQTTEQQAGASASMAVDAVAEPANAVKGAGKE | | 694.335 | 6 | 4160.972 | 4160.971 | 0 | 0.2 | 248 | 569.4 | 485.9 | 485.9 | 7.04 |
| | MK.E | | | | | | | | | | | | |
| 1066 | K.GGSSEPGTELQTTEQQAGASASMAVDAVAEPANAVK.G | | 865.660 | 4 | 3459.618 | 3459.618 | 0 | 0.0 | 248 | 510.4 | 510.4 | 510.4 | 7.00 |
| 1567 | K.GGSSEPGTELQTTEQQAGASASM[+15.995]AVDAVAEPANAVK | M[+16] | 1159.212 | 3 | 3475.620 | 3475.613 | 0 | 2.1 | 248 | 599.2 | 599.2 | 599.2 | 6.51 |
| | .G | | | | | | | | | | | | |
| 1066 | K.GGSSEPGTELQTTEQQAGASASMAVDAVAEPANAVK.G | | 1153.876 | 3 | 3459.612 | 3459.618 | 0 | −1.6 | 248 | 482.6 | 482.6 | 482.6 | 5.88 |
| 1210 | K.GGSSEPGTELQTTEQQAGASASMAVDAVAEPANAVKGAGKE | | 1040.993 | 4 | 4160.951 | 4160.971 | 0 | −4.9 | 248 | 490.4 | 490.4 | 490.4 | 4.91 |
| | MK.E | | | | | | | | | | | | |
| 1483 | K.GGSSEPGTELQTTEQQAGASASMAVDAVAEPAN[+0.984]AVK | N[+1] | 1041.495 | 4 | 4162.956 | 4161.955 | 1 | −0.5 | 248 | 349.6 | 349.6 | 42.4 | 3.21 |
| | GAGKEMK.E | | | | | | | | | | | | |
| 1725 | R.MKQPPATTPPFKTHC[+57.021]QEAETK.T | C[+57] | 607.550 | 4 | 2427.178 | 2427.180 | 0 | −0.7 | 296 | 679.7 | 679.7 | 679.7 | 10.28 |
| 1725 | R.MKQPPATTPPFKTHC[+57.021]QEAETK.T | C[+57] | 607.551 | 1 | 2427.181 | 2427.180 | 0 | 0.8 | 296 | 602.1 | 602.1 | 602.1 | 10.19 |
| 1666 | R.M[+15.995]KQPPATTPPFKTHC[+57.021]QEAETK.T | C[+57], | 611.549 | 4 | 2443.175 | 2443.174 | 0 | 0.3 | 296 | 562.1 | 562.1 | 562.1 | 9.19 |
| | | M[+16] | | | | | | | | | | | |
| 1725 | R.MKQPPATTPPFKTHC[+57.021]QEAETK.T | C[+57] | 809.731 | 3 | 2427.179 | 2427.180 | 0 | −0.1 | 296 | 1619.2 | 619.2 | 619.2 | 8.85 |
| 1666 | R.M[+15.995]KQPPATTPPFKTHC[+57.021]QEAETK.T | C[+57], | 611.549 | 4 | 2443.175 | 2443.174 | 0 | 0.0 | 296 | 506.3 | 506.3 | 506.3 | 8.39 |
| | | M[+16] | | | | | | | | | | | |
| 1725 | R.MKQPPATTPPFKTHC[+57.021]QEAETK.T | C[+57] | 486.242 | 5 | 2427.179 | 2427.180 | 0 | −0.3 | 296 | 446.5 | 446.5 | 446.5 | 8.18 |
| 1666 | R.M[+15.995]KQPPATTPPFKTHC[+57.021]QEAETK.T | C[+57], | 489.441 | 5 | 2443.174 | 2443.174 | 0 | −0.1 | 296 | 440.3 | 440.3 | 440.3 | 8.18 |
| | | M[+16] | | | | | | | | | | | |
| 824 | R.MKQPPATTPPFK.T | | 448.244 | 3 | 1342.719 | 1342.719 | 0 | 0.0 | 296 | 436.7 | 436.7 | 436.7 | 7.60 |
| 1662 | R.MKQPPATT[+79.966]PPFKTHC[+57.021]QEAETK.T | C[+57], | 627.542 | 4 | 2507.147 | 2507.146 | 0 | 0.3 | 296 | 424.7 | 406.6 | 32.7 | 7.47 |
| | | T[+80] | | | | | | | | | | | |
| 1725 | R.MKQPPATTPPFKTHC[+57.021]QEAETK.T | C[+57] | 486.242 | 5 | 2427.179 | 2427.180 | 0 | 0.0 | 296 | 420.5 | 420.5 | 420.5 | 7.47 |
| 1725 | R.MKQPPATTPPFKTHC[+57.021]QEAETK.T | C[+57] | 486.242 | 5 | 2427.180 | 2427.180 | 0 | 0.2 | 296 | 446.2 | 446.2 | 446.2 | 7.41 |
| 824 | R.MKQPPATTPPFK.T | | 448.245 | 3 | 1342.719 | 1342.719 | 0 | 0.2 | 296 | 417.2 | 417.2 | 417.2 | 7.38 |
| 1666 | R.M[+15.995]KQPPATTPPFKTHC[+57.021]QEAETK.T | C[+57], | 489.441 | 5 | 2443.174 | 2443.174 | 0 | −0.1 | 296 | 393.2 | 393.2 | 393.2 | 7.36 |
| | | M[+16] | | | | | | | | | | | |
| 1666 | R.M[+15.995]KQPPATTPPFKTHC[+57.021]QEAETK.T | C[+57], | 489.441 | 5 | 2443.177 | 2443.174 | 0 | 1.0 | 296 | 377.1 | 377.1 | 377.1 | 7.36 |
| | | M[+16] | | | | | | | | | | | |
| 824 | R.MKQPPATTPPFK.T | | 671.863 | 2 | 1342.718 | 1342.719 | 0 | −0.8 | 296 | 395.6 | 395.6 | 395.6 | 6.35 |
| 1666 | R.M[+15.995]KQPPATTPPFKTHC[+57.021]QEAETK.T | C[+57], | 611.551 | 4 | 2443.181 | 2443.174 | 0 | 2.6 | 296 | 477.9 | 477.9 | 477.9 | 6.34 |
| | | M[+16] | | | | | | | | | | | |
| 824 | R.MKQPPATTPPFK.T | | 671.863 | 2 | 1342.719 | 1342.719 | 0 | 0.5 | 296 | 347.0 | 347.0 | 347.0 | 5.78 |
| 1539 | R.M[+15.995]KQPPATTPPFK.T | M[+16] | 453.576 | 3 | 1358.713 | 1358.714 | 0 | −0.3 | 296 | 352.9 | 259.5 | 259.5 | 5.48 |
| 824 | R.MKQPPATTPPFK.T | | 448.244 | 3 | 1342.719 | 1342.719 | 0 | −0.1 | 296 | 310.6 | 310.6 | 310.6 | 5.32 |
| 1539 | R.M[+15.995]KQPPATTPPFK.T | M[+16] | 453.576 | 3 | 1358.712 | 1358.714 | 0 | −1.1 | 296 | 410.6 | 277.3 | 277.3 | 4.99 |
| 1666 | R.M[+15.995]KQPPATTPPFKTHC[+57.021]QEAETK.T | C[+57], | 489.440 | 5 | 2443.171 | 2443.174 | 0 | −1.5 | 296 | 344.1 | 344.1 | 344.1 | 4.73 |
| | | M[+16] | | | | | | | | | | | |
| 1687 | K.QPPATTPPFKTHC[+57.021]QEAETK.T | C[+57] | 542.767 | 4 | 2168.046 | 2168.044 | 0 | 0.9 | 298 | 360.3 | 360.3 | 360.3 | 7.70 |
| 3492 | K.QPPATTPPFK.T | | 542.295 | 2 | 1083.583 | 1083.583 | 0 | 0.0 | 298 | 331.2 | 331.2 | 331.2 | 5.86 |
| 1690 | K.THC[+57.021]QEAETKTKDEMAAAEEK.V | C[+57] | 769.681 | 3 | 2307.027 | 2307.023 | 0 | 2.0 | 308 | 817.3 | 817.3 | 817.3 | 11.55 |
| 1690 | K.THC[+57.021]QEAETKTKDEMAAAEEK.V | C[+57] | 577.511 | 4 | 2307.024 | 2307.023 | 0 | 0.4 | 308 | 608.6 | 608.6 | 608.6 | 10.19 |
| 1667 | K.THC[+57.021]QEAETKTKDEM[+15.995]AAAEEK.V | C[+57], | 581.510 | 4 | 2323.019 | 2323.018 | 0 | 0.4 | 308 | 512.1 | 512.1 | 512.1 | 7.84 |
| | | M[+16] | | | | | | | | | | | |
| 1690 | K.THC[+57.021]QEAETKTKDEMAAAEEK.V | C[+57] | 577.512 | 4 | 2307.024 | 2307.023 | 0 | 0.7 | 308 | 403.8 | 403.8 | 403.8 | 7.25 |
| 1690 | K.THC[+57.021]QEAETKTKDEMAAAEEK.V | C[+57] | 462.210 | 5 | 2307.022 | 2307.023 | 0 | −0.2 | 308 | 374.2 | 374.2 | 374.2 | 7.14 |
| 1357 | K.TKDEMAAAEEKVGK.N | | 502.921 | 3 | 1506.747 | 1506.747 | 0 | 0.0 | 317 | 696.0 | 617.6 | 617.6 | 10.99 |
| 1357 | K.TKDEMAAAEEKVGK.N | | 502.920 | 3 | 1506.747 | 1506.747 | 0 | −0.2 | 317 | 359.6 | 359.6 | 359.6 | 5.26 |
| 1493 | K.VGKN[+0.984]EQGEPEDLKKPEGK.N | N[+1] | 496.757 | 4 | 1984.008 | 1983.003 | 1 | 0.6 | 328 | 324.3 | 324.3 | 324.3 | 5.65 |
| 3402 | K.VGKNEQGEPEDLKKPEGK.N | | 496.256 | 4 | 1982.001 | 1982.019 | 0 | 8.9 | 328 | 333.8 | 333.8 | 333.8 | 4.09 |
| 3625 | R.SAAAVKNEKEQK.N | | 434.905 | 3 | 1302.701 | 1302.701 | 0 | −0.4 | 348 | 356.7 | 356.7 | 356.7 | 5.44 |
| 2203 | K.NQEADVQEVK.A | | 580.283 | 2 | 1159.559 | 1159.559 | 0 | −0.3 | 360 | 443.5 | 443.5 | 443.5 | 7.60 |
| 4142 | K.ASTLSPGGGVTVFFHAIISLHFPFNPDLHK.V | | 642.142 | 5 | 3206.683 | 3206.679 | 0 | 1.4 | 370 | 673.0 | 673.0 | 673.0 | 11.11 |
| 994 | K.SSLLGSGDWHQYYDIVYMKPHGR.L | | 678.078 | 4 | 2709.289 | 2709.288 | 0 | 0.3 | 484 | 531.3 | 531.3 | 531.3 | 9.12 |
| 994 | K.SSLLGSGDWHQYYDIVYMKPHGR.L | | 542.663 | 5 | 2709.288 | 2709.288 | 0 | 0.1 | 484 | 430.9 | 430.9 | 430.9 | 8.62 |
| 1590 | K.SSLLGSGDWHQYYDIVYM[+15.995]KPHGR.L | M[+16] | 682.076 | 4 | 2725.284 | 2725.283 | 0 | 0.3 | 484 | 495.6 | 495.6 | 495.6 | 18.21 |
| 994 | K.SSLLGSGDWHQYYDIVYMKPHGR.L | | 678.078 | 4 | 2709.289 | 2709.288 | 0 | 0.4 | 484 | 423.6 | 423.6 | 423.6 | 7.85 |
| 1590 | K.SSLLGSGDWHQYYDIVYM[+15.995]KPHGR.L | M[+16] | 682.077 | 4 | 2725.285 | 2725.283 | 0 | 0.8 | 484 | 433.2 | 433.2 | 433.2 | 7.65 |
| 860 | K.VMNHITDGPRKDLVK.G | | 574.982 | 3 | 1722.932 | 1722.932 | 0 | 0.1 | 510 | 577.8 | 577.8 | 577.8 | 7.64 |
| 860 | K.VMNHITDGPRKDLVK.G | | 431.489 | 4 | 1722.933 | 1722.932 | 0 | 0.5 | 510 | 366.1 | 366.1 | 366.1 | 6.93 |
| 860 | K.VMNHITDGPRKDLVK.G | | 431.489 | 4 | 1722.933 | 1722.932 | 0 | 0.4 | 510 | 362.6 | 362.6 | 362.6 | 6.93 |
| 860 | K.VMNHITDGPRKDLVK.G | | 861.970 | 2 | 1722.933 | 1722.932 | 0 | 0.3 | 510 | 482.3 | 482.3 | 482.3 | 6.28 |
| 860 | K.VMNHITDGPRKDLVK.G | | 431.489 | 4 | 1722.933 | 1722.932 | 0 | 0.4 | 510 | 332.6 | 332.6 | 332.6 | 5.64 |
| 1526 | K.VM[+15.995]NHITDGPRKDLVK.G | M[+16] | 580.314 | 3 | 1738.927 | 1738.927 | 0 | 0.0 | 510 | 374.6 | 374.6 | 374.6 | 5.38 |
| 1834 | K.RYLWQHLKK.H | | 424.584 | 3 | 1271.737 | 1271.737 | 0 | 0.1 | 588 | 405.1 | 405.1 | 405.1 | 5.84 |
| 2363 | R.YLWQHLK.K | | 494.274 | 2 | 987.541 | 987.541 | 0 | −0.2 | 589 | 448.4 | 448.4 | 448.4 | 7.42 |
| 907 | R.YLWQHLKK.H | | 558.322 | 2 | 1115.636 | 1115.636 | 0 | −0.1 | 589 | 483.6 | 483.6 | 483.6 | 6.40 |
| 2363 | R.YLWQHLK.K | | 494.275 | 2 | 987.542 | 987.541 | 0 | 0.7 | 589 | 310.6 | 310.6 | 310.6 | 5.58 |
| 907 | R.YLWQHLKK.H | | 558.322 | 2 | 1115.637 | 1115.636 | 0 | 0.4 | 589 | 357.7 | 357.7 | 357.7 | 4.25 |
| 956 | K.HVVPLPDGK.S | | 481.277 | 2 | 961.546 | 961.547 | 0 | −0.3 | 597 | 534.1 | 392.9 | 392.9 | 8.36 |
| 956 | K.HVVPLPDGK.S | | 481.277 | 2 | 961.546 | 961.547 | 0 | −0.4 | 597 | 463.5 | 383.4 | 383.4 | 6.89 |
| 956 | K.HVVPLPDGK.S | | 481.277 | 2 | 961.546 | 961.547 | 0 | −0.3 | 597 | 513.5 | 351.8 | 351.8 | 6.83 |
| 956 | K.HVVPLPDGK.S | | 481.277 | 2 | 961.546 | 961.547 | 0 | −0.3 | 597 | 375.9 | 216.4 | 216.4 | 5.89 |
| 1704 | K.STDFLPVDC[+57.021]PVR.S | C[+57] | 703.343 | 2 | 1405.678 | 1405.678 | 0 | 0.2 | 606 | 561.8 | 518.8 | 518.8 | 9.58 |
| 1704 | K.STDFLPVDC[+57.021]PVR.S | C[+57] | 469.231 | 3 | 1405.678 | 1405.678 | 0 | −0.1 | 606 | 443.2 | 443.2 | 443.2 | 7.06 |
| 812 | R.DLSHILGIPQSWR.L | | 507.944 | 3 | 1521.817 | 1521.817 | 0 | −0.3 | 661 | 498.2 | 498.2 | 498.2 | 8.78 |
| 812 | R.DLSHILGIPQSWR.L | | 507.944 | 3 | 1521.817 | 1521.817 | 0 | 0.0 | 661 | 341.8 | 341.8 | 341.8 | 6.04 |
| 2002 | K.DAWRQPEDTWAALEGLSFSPFR.E | | 860.415 | 3 | 2579.231 | 2579.231 | 0 | −0.1 | 710 | 421.6 | 421.6 | 421.6 | 7.21 |
| 2002 | K.DAWRQPEDTWAALEGLSFSPFR.E | | 860.415 | 3 | 2579.231 | 2579.231 | 0 | −0.2 | 710 | 374.7 | 374.7 | 374.7 | 7.09 |
| 1133 | R.QPEDTWAALEGLSFSPFREQMLDTSSLLQFMR.E | | 933.452 | 4 | 3730.787 | 3730.788 | 0 | −0.3 | 714 | 659.7 | 659.7 | 659.7 | 10.32 |
| 885 | R.QPEDTWAALEGLSFSPFR.E | | 1025.998 | 2 | 2050.988 | 2050.987 | 0 | 0.4 | 714 | 533.0 | 533.0 | 533.0 | 9.12 |
| 1133 | R.QPEDTWAALEGLSFSPFREQMLDTSSLLQFMR.E | | 1244.267 | 3 | 3730.786 | 3730.788 | 0 | −0.5 | 714 | 601.9 | 601.9 | 601.9 | 8.94 |
| 1133 | R.QPEDTWAALEGLSFSPFREQMLDTSSLLQFMR.E | | 933.453 | 4 | 3730.789 | 3730.788 | 0 | 0.2 | 714 | 595.7 | 595.7 | 595.7 | 7.77 |
| 885 | R.QPEDTWAALEGLSFSPFR.E | | 684.334 | 3 | 2050.987 | 2050.987 | 0 | 0.1 | 714 | 429.9 | 429.9 | 429.9 | 7.53 |
| 1616 | R.QPEDTWAALEGLSFSPFREQM[+15.995]LDTSSLLQFMR.E | M[+16] | 1249.936 | 3 | 3747.792 | 3746.783 | 1 | 1.6 | 714 | 512.3 | 512.3 | 144.5 | 7.50 |
| 949 | R.EQMLDTSSLLQFMR.E | | 849.914 | 2 | 1698.820 | 1698.819 | 0 | 0.6 | 732 | 667.1 | 667.1 | 667.1 | 11.58 |
| 949 | R.EQMLDTSSLLQFMR.E | | 849.914 | 2 | 1698.820 | 1698.819 | 0 | 0.6 | 732 | 586.3 | 586.3 | 586.3 | 9.58 |
| 949 | R.EQMLDTSSLLQFMR.E | | 566.945 | 3 | 1698.820 | 1698.819 | 0 | 0.5 | 732 | 493.2 | 493.2 | 493.2 | 7.69 |
| 1558 | R.EQM[+15.995]LDTSSLLQFMR.E | M[+16] | 572.277 | 3 | 1714.815 | 1714.814 | 0 | 0.6 | 732 | 411.8 | 411.8 | 411.8 | 7.10 |
| 1860 | R.EKQHLLSIDEPLFR.S | | 431.989 | 4 | 1724.933 | 1724.933 | 0 | 0.1 | 746 | 350.9 | 350.9 | 350.9 | 5.98 |
| 1860 | R.EKQHLLSIDEPLFR.S | | 575.649 | 3 | 1724.933 | 1724.933 | 0 | 0.2 | 746 | 301.6 | 301.6 | 301.6 | 5.50 |
| 2190 | K.QHLLSIDEPLFR.S | | 489.937 | 3 | 1467.795 | 1467.795 | 0 | −0.1 | 748 | 429.5 | 429.5 | 429.5 | 7.86 |
| 3084 | R.LLSLVDSAGQRDETGN[+0.984]NSVQTVFQGTLAATKR.W | N[+1] | 845.180 | 4 | 3377.696 | 3377.730 | 0 | −9.9 | 881 | 319.2 | 319.2 | 26.7 | 2.36 |
| 1226 | R.DETGNNSVQTVFQGTLAATKR.W | | 746.377 | 3 | 2237.117 | 2237.116 | 0 | 0.4 | 892 | 661.4 | 661.4 | 661.4 | 11.53 |
| 867 | R.LVEIQFPAEHGWKESLLGDMEWR.L | | 924.796 | 3 | 2772.373 | 2770.366 | 2 | 0.1 | 942 | 509.9 | 509.9 | 509.9 | 7.95 |
| 867 | R.LVEIQFPAEHGWKESLLGDMEWR.L | | 693.347 | 4 | 2770.365 | 2770.366 | 0 | −0.3 | 942 | 448.5 | 448.5 | 448.5 | 7.75 |
| 867 | R.LVEIQFPAEHGWKESLLGDMEWR.L | | 693.347 | 4 | 2770.368 | 2770.366 | 0 | 0.8 | 942 | 391.7 | 389.2 | 389.2 | 7.47 |
| 867 | R.LVEIQFPAEHGWKESLLGDMEWR.L | | 924.466 | 3 | 2771.382 | 2770.366 | 1 | 4.6 | 942 | 394.3 | 394.3 | 394.3 | 5.67 |
| 4202 | K.ESLLGDMEWR.L | | 618.290 | 2 | 1235.572 | 1235.573 | 0 | −0.2 | 955 | 558.0 | 558.0 | 558.0 | 8.91 |
| 996 | K.GLEDSVAKTFEK.C | | 662.344 | 2 | 1323.680 | 1323.679 | 0 | 0.6 | 986 | 594.6 | 594.6 | 594.6 | 8.77 |
| 996 | K.GLEDSVAKTFEK.C | | 441.898 | 3 | 1323.679 | 1323.679 | 0 | 0.0 | 986 | 526.7 | 526.7 | 526.7 | 8.65 |
| 996 | K.GLEDSVAKTFEK.C | | 441.898 | 3 | 1323.679 | 1323.679 | 0 | −0.2 | 986 | 337.1 | 337.1 | 337.1 | 5.32 |
| 972 | K.FGIVLSAVITK.S | | 574.358 | 2 | 1147.708 | 1147.709 | 0 | −0.1 | 1025 | 483.9 | 483.9 | 483.9 | 8.01 |
| 972 | K.FGIVLSAVITK.S | | 574.358 | 2 | 1147.709 | 1147.709 | 0 | 0.0 | 1025 | 401.9 | 401.9 | 401.9 | 7.64 |
| 913 | R.TADNFDDILKHLLTLADVK.H | | 714.720 | 3 | 2142.147 | 2142.144 | 0 | 1.1 | 1040 | 726.9 | 726.9 | 726.9 | 12.53 |
| 913 | R.TADNFDDILKHLLTLADVK.H | | 536.292 | 4 | 2142.144 | 2142.144 | 0 | 0.0 | 1040 | 571.5 | 571.5 | 571.5 | 9.53 |
| 913 | R.TADNFDDILKHLLTLADVK.H | | 536.542 | 4 | 2143.146 | 2142.144 | 1 | −0.8 | 1040 | 508.7 | 508.7 | 178.6 | 7.81 |
| 817 | R.TADNFDDILK.H | | 576.283 | 2 | 1151.558 | 1151.558 | 0 | 0.2 | 1040 | 368.0 | 368.0 | 368.0 | 7.14 |
| 1060 | K.HLLTLADVK.H | | 505.306 | 2 | 1009.604 | 1009.604 | 0 | −0.1 | 1050 | 549.5 | 549.5 | 549.5 | 8.14 |
| 1724 | R.LC[+57.021]GTDEKILANVTEDAKR.L | C[+57] | 509.014 | 4 | 2033.033 | 2033.033 | 0 | 0.1 | 1063 | 566.5 | 566.5 | 566.5 | 9.19 |
| 1724 | R.LC[+57.021]GTDEKILANVTEDAKR.L | C[+57] | 678.350 | 3 | 2033.034 | 2033.033 | 0 | 0.4 | 1063 | 507.6 | 507.6 | 507.6 | 8.39 |
| 951 | K.ILANVTEDAKR.L | | 615.346 | 2 | 1229.684 | 1229.685 | 0 | −0.4 | 1070 | 565.2 | 565.2 | 565.2 | 9.32 |
| 951 | K.ILANVTEDAKR.L | | 410.566 | 3 | 1229.685 | 1229.685 | 0 | −0.1 | 1070 | 559.3 | 559.3 | 559.3 | 8.65 |
| 951 | K.ILANVTEDAKR.L | | 410.566 | 3 | 1229.685 | 1229.685 | 0 | −0.1 | 1070 | 546.6 | 546.6 | 546.6 | 8.65 |
| 951 | K.ILANVTEDAKR.L | | 410.566 | 3 | 1229.685 | 1229.685 | 0 | −0.2 | 1070 | 444.6 | 444.6 | 444.6 | 7.54 |
| 951 | K.ILANVTEDAKR.L | | 410.567 | 3 | 1229.685 | 1229.685 | 0 | 0.0 | 1070 | 429.2 | 429.2 | 429.2 | 7.38 |
| 829 | K.ILANVTEDAK.R | | 537.295 | 2 | 1073.584 | 1073.584 | 0 | −0.2 | 1070 | 500.6 | 333.1 | 333.1 | 7.05 |
| 1772 | K.RLIAVADSVLTK.V | | 429.266 | 3 | 1285.784 | 1285.784 | 0 | −0.2 | 1080 | 444.8 | 444.8 | 444.8 | 7.80 |
| 1772 | K.RLIAVADSVLTK.V | | 643.396 | 2 | 1285.784 | 1285.784 | 0 | −0.1 | 1080 | 325.1 | 325.1 | 325.1 | 5.58 |
| 2210 | R.LIAVADSVLTK.V | | 565.345 | 2 | 1129.682 | 1129.683 | 0 | −0.2 | 1081 | 523.4 | 523.4 | 523.4 | 8.14 |
| 2210 | R.LIAVADSVLTK.V | | 565.345 | 2 | 1129.683 | 1129.683 | 0 | −0.1 | 1081 | 416.3 | 270.4 | 270.4 | 6.17 |
| 1220 | K.VVGDLLSGTILVGQLELIIK.H | | 694.093 | 3 | 2080.265 | 2080.263 | 0 | 1.0 | 1092 | 580.5 | 580.5 | 580.5 | 9.25 |
| 1973 | K.HKNQFLDIWQLR.E | | 533.291 | 3 | 1597.859 | 1597.860 | 0 | −0.3 | 1112 | 377.1 | 377.1 | 377.1 | 7.06 |
| 3513 | K.HKNQFLDIWQLREK.S | | 464.505 | 4 | 1854.998 | 1854.997 | 0 | 0.4 | 1112 | 375.6 | 375.6 | 375.6 | 6.73 |
| 3513 | K.HKNQFLDIWQLREK.S | | 464.505 | 4 | 1854.999 | 1854.997 | 0 | 0.8 | 1112 | 337.0 | 337.0 | 337.0 | 5.26 |
| 1973 | K.HKNQFLDIWQLR.E | | 533.626 | 3 | 1598.863 | 1597.860 | 1 | −0.4 | 1112 | 307.1 | 307.1 | 307.1 | 3.54 |
| 2135 | K.NQFLDIWQLR.E | | 666.857 | 2 | 1332.707 | 1332.706 | 0 | 0.5 | 1114 | 498.0 | 433.0 | 433.0 | 8.01 |
| 2135 | K.NQFLDIWQLR.E | | 444.907 | 3 | 1332.706 | 1332.706 | 0 | 0.0 | 1114 | 465.8 | 465.8 | 465.8 | 7.06 |
| 2369 | K.NQFLDIWQLREK.S | | 530.619 | 3 | 1589.843 | 1589.844 | 0 | −0.6 | 1114 | 439.5 | 439.5 | 439.5 | 6.46 |
| 1763 | R.REELLLLK.K | | 507.321 | 2 | 1013.635 | 1013.635 | 0 | −0.3 | 1144 | 345.3 | 345.3 | 345.3 | 5.58 |
| 3455 | R.REELLLLKK.E | | 571.369 | 2 | 1141.730 | 1141.730 | 0 | 0.0 | 1144 | 314.3 | 314.3 | 314.3 | 3.58 |
| 989 | R.EELLLLKK.E | | 493.318 | 2 | 985.629 | 985.629 | 0 | −0.1 | 1145 | 518.7 | 518.7 | 518.7 | 7.97 |
| 2221 | R.EELLLLK.K | | 429.271 | 2 | 857.534 | 857.534 | 0 | 0.2 | 1145 | 452.9 | 452.9 | 452.9 | 7.80 |
| 989 | R.EELLLLKK.E | | 493.318 | 2 | 985.629 | 985.629 | 0 | 0.0 | 1145 | 400.1 | 400.1 | 400.1 | 7.00 |
| 989 | R.EELLLLKK.E | | 493.318 | 2 | 985.629 | 985.629 | 0 | 0.1 | 1145 | 356.1 | 356.1 | 356.1 | 5.60 |
| 1703 | R.C[+57.021]VDSLLK.M | C[+57] | 417.723 | 2 | 834.439 | 834.439 | 0 | 0.1 | 1156 | 466.3 | 466.3 | 466.3 | 7.42 |
| 1703 | R.C[+57.021]VDSLLK.M | C[+57] | 417.723 | 2 | 834.439 | 834.439 | 0 | −0.2 | 1156 | 436.2 | 436.2 | 436.2 | 7.26 |
| 926 | K.HLIQVDFGVLAVR.H | | 489.621 | 3 | 1466.848 | 1466.848 | 0 | 0.4 | 1169 | 456.6 | 456.6 | 456.6 | 8.02 |
| 926 | K.HLIQVDFGVLAVR.H | | 489.621 | 3 | 1466.848 | 1466.848 | 0 | 0.1 | 1169 | 446.4 | 446.4 | 446.4 | 7.80 |
| 926 | K.HLIQVDFGVLAVR.H | | 489.621 | 3 | 1466.848 | 1466.848 | 0 | −0.1 | 1169 | 395.2 | 395.2 | 395.2 | 7.53 |
| 926 | K.HLIQVDFGVLAVR.H | | 489.621 | 3 | 1466.847 | 1466.848 | 0 | −0.6 | 1169 | 501.7 | 501.7 | 501.7 | 7.31 |
| 1160 | R.HSQDLSSKRLNDTVTVR.L | | 489.762 | 4 | 1956.026 | 1956.026 | 0 | 0.1 | 1182 | 558.2 | 558.2 | 558.2 | 8.52 |
| 2114 | R.LNDTVTVR.L | | 459.256 | 2 | 917.505 | 917.505 | 0 | 0.0 | 1191 | 366.6 | 366.6 | 366.6 | 6.87 |
| 811 | R.ATHYHLSSQVQEMAGKIDLLR.D | | 600.064 | 4 | 2397.236 | 2397.234 | 0 | 0.6 | 1208 | 698.1 | 698.1 | 698.1 | 11.53 |
| 1562 | R.ATHYHLSSQVQEM[+15.995]AGK.I | M[+16] | 601.621 | 3 | 1802.849 | 1802.849 | 0 | −0.2 | 1208 | 604.1 | 604.1 | 604.1 | 10.58 |
| 1562 | R.ATHYHLSSQVQEM[+15.995]AGK.I | M[+16] | 601.622 | 3 | 1802.850 | 1802.849 | 0 | 0.6 | 1208 | 600.4 | 600.4 | 600.4 | 10.58 |
| 1012 | R.ATHYHLSSQVQEMAGK.I | | 893.931 | 2 | 1786.854 | 1786.854 | 0 | 0.2 | 1208 | 662.9 | 662.9 | 662.9 | 10.24 |
| 1562 | R.ATHYHLSSQVQEM[+15.995]AGK.I | M[+16] | 601.621 | 3 | 1802.850 | 1802.849 | 0 | 0.4 | 1208 | 531.3 | 531.3 | 531.3 | 8.91 |
| 1012 | R.ATHYHLSSQVQEMAGK.I | | 596.290 | 3 | 1786.855 | 1786.854 | 0 | 0.5 | 1208 | 509.4 | 509.4 | 509.4 | 8.78 |
| 1562 | R.ATHYHLSSQVQEM[+15.995]AGK.I | M[+16] | 451.468 | 4 | 1802.850 | 1802.849 | 0 | 0.3 | 1208 | 460.3 | 460.3 | 460.3 | 8.57 |
| 1012 | R.ATHYHLSSQVQEMAGK.I | | 447.469 | 4 | 1786.856 | 1786.854 | 0 | 1.0 | 1208 | 443.5 | 443.5 | 443.5 | 8.57 |
| 1012 | R.ATHYHLSSQVQEMAGK.I | | 596.289 | 3 | 1786.854 | 1786.854 | 0 | −0.2 | 1208 | 524.1 | 524.1 | 524.1 | 8.36 |
| 1012 | R.ATHYHLSSQVQEMAGK.I | | 447.469 | 4 | 1786.855 | 1786.854 | 0 | 0.2 | 1208 | 512.4 | 512.4 | 512.4 | 8.23 |
| 1562 | R.ATHYHLSSQVQEM[+15.995]AGK.I | M[+16] | 451.468 | 4 | 1802.849 | 1802.849 | 0 | −0.3 | 1208 | 419.5 | 405.3 | 405.3 | 7.86 |
| 1012 | R.ATHYHLSSQVQEMAGK.I | | 447.470 | 4 | 1786.856 | 1786.854 | 0 | 1.2 | 1208 | 398.1 | 398.1 | 398.1 | 7.75 |
| 1562 | R.ATHYHLSSQVQEM[+15.995]AGK.I | M[+16] | 601.622 | 3 | 1802.851 | 1802.849 | 0 | 0.9 | 1208 | 415.4 | 415.4 | 415.4 | 7.64 |
| 1012 | R.ATHYHLSSQVQEMAGK.I | | 447.469 | 4 | 1786.856 | 1786.854 | 0 | 1.0 | 1208 | 406.4 | 406.4 | 406.4 | 7.64 |
| 1562 | R.ATHYHLSSQVQEM[+15.995]AGK.I | M[+16] | 451.468 | 4 | 1802.848 | 1802.849 | 0 | −0.5 | 1208 | 367.6 | 367.6 | 367.6 | 6.41 |
| 1012 | R.ATHYHLSSQVQEMAGK.I | | 447.469 | 4 | 1786.855 | 1786.854 | 0 | 0.2 | 1208 | 307.7 | 307.7 | 307.7 | 5.97 |
| 1012 | R.ATHYHLSSQVQEMAGK.I | | 447.469 | 4 | 1786.855 | 1786.854 | 0 | 0.6 | 1208 | 315.1 | 315.1 | 315.1 | 5.76 |
| 1012 | R.ATHYHLSSQVQEMAGK.I | | 447.469 | 4 | 1786.854 | 1786.854 | 0 | −0.2 | 1208 | 315.1 | 315.1 | 315.1 | 5.58 |
| 3483 | K.IDLLRDSHIFQLFWR.E | | 490.521 | 4 | 1959.061 | 1959.060 | 0 | 0.4 | 1224 | 314.5 | 314.5 | 314.5 | 5.32 |
| 838 | R.DSHIFQLFWR.E | | 674.843 | 2 | 1348.680 | 1348.680 | 0 | −0.1 | 1229 | 554.0 | 554.0 | 554.0 | 8.36 |
| 838 | R.DSHIFQLFWR.E | | 450.231 | 3 | 1348.679 | 1348.680 | 0 | −0.3 | 1229 | 443.3 | 443.3 | 443.3 | 7.60 |
| 1380 | R.EAAEPLSEPKEDQEAAELLSEPEEESERHILELEEVYDYLYQPS | | 1363.889 | 4 | 5452.536 | 5452.539 | 0 | −0.6 | 1239 | 936.9 | 739.0 | 739.0 | 14.21 |
| | YR.K | | | | | | | | | | | | |
| 1469 | R.EAAEPLSEPKEDQEAAELLSEPEEES[+79.966]ERHILELEE | S[+80] | 1383.883 | | 5532.509 | 5532.505 | 0 | 0.5 | 1239 | 796.8 | 779.7 | 146.9 | 12.13 |
| | VYDYLYQPSYR.K | | | | | | | | | | | | |
| 1380 | R.EAAEPLSEPKEDQEAAELLSEPEEESERHILELEEVYDYLYQPS | | 1363.889 | 4 | 5452.536 | 5452.539 | 0 | −0.6 | 1239 | 683.5 | 683.5 | 683.5 | 9.22 |
| | YR.K | | | | | | | | | | | | |
| 1380 | R.EAAEPLSEPKEDQEAAELLSEPEEESERHILELEEVYDYLYQPS | | 1091.313 | | 5452.537 | 5452.539 | 0 | −0.4 | 1239 | 627.1 | 627.1 | 627.1 | 9.13 |
| | YR.K | | | | | | | | | | | | |
| 1468 | R.EAAEPLSEPKEDQEAAELLS[+79.966]EPEEESERHILELEE | S[+80] | 1107.308 | 5 | 5532.511 | 5532.505 | 0 | 1.1 | 1239 | 610.7 | 610.7 | 3.5 | 9.13 |
| | VYDYLYQPSYR.K | | | | | | | | | | | | |
| 1299 | R.EAAEPLSEPKEDQEAAELLSEPEEESER.H | | 1047.812 | 3 | 3141.421 | 3141.423 | 0 | −0.6 | 1239 | 599.6 | 599.6 | 599.6 | 8.61 |
| 3076 | R.EAAEPLSEPKEDQEAAELLS[+79.966]EPEEESER.H | S[+80] | 1074.802 | 3 | 3222.391 | 3221.389 | 1 | −0.6 | 1239 | 582.1 | 582.1 | 96.3 | 8.61 |
| 1380 | R.EAAEPLSEPKEDQEAAELLSEPEEESERHILELEEVYDYLYQPS | | 1091.314 | 5 | 5452.539 | 5452.539 | 0 | 0.0 | 1239 | 541.8 | 541.8 | 541.8 | 6.91 |
| | YR.K | | | | | | | | | | | | |
| 1299 | R.EAAEPLSEPKEDQEAAELLSEPEEESER.H | | 786.362 | 4 | 3142.425 | 3141.423 | 1 | −0.3 | 1239 | 449.8 | 449.8 | 449.8 | 6.55 |
| 3065 | R.EAAEPLSEPKEDQEAAELLSEPEEESERHILELEEVY | Y[+80] | 922.924 | 6 | 5532.510 | 5532.505 | 0 | 0.8 | 1239 | 496.0 | 480.6 | 27.7 | 5.82 |
| | [+79.966]DYLYQPSYR.K | | | | | | | | | | | | |
| 1380 | R.EAAEPLSEPKEDQEAAELLSEPEEESERHILELEEVYDYLYQPS | | 909.763 | 6 | 5453.540 | 5452.539 | 1 | −0.4 | 1239 | 446.8 | 446.8 | 446.8 | 5.61 |
| | YR.K | | | | | | | | | | | | |
| 3065 | R.EAAEPLSEPKEDQEAAELLSEPEEESERHILELEEVY | Y[+80] | 1107.708 | 5 | 5534.508 | 5532.505 | 2 | −0.7 | 1239 | 443.9 | 443.9 | 7.1 | 4.78 |
| | [+79.966]DYLYQPSYR.K | | | | | | | | | | | | |
| 3475 | R.HILELEEVYDYLYQPSYR.K | | 777.382 | 3 | 2330.133 | 2330.134 | 0 | −0.6 | 1267 | 302.8 | 302.8 | 302.8 | 4.87 |
| 2956 | K.SGEVTLAEIDVIFKDFVNK.Y | | 708.713 | 3 | 2124.123 | 2124.122 | 0 | 0.4 | 1295 | 543.4 | 543.4 | 543.4 | 8.86 |
| 3848 | K.SGEVTLAEIDVIFKDFVNKYTDLDSELK.I | | 797.913 | 4 | 3188.629 | 3188.625 | 0 | 1.2 | 1295 | 413.7 | 413.7 | 413.7 | 7.05 |
| 3923 | K.YTDLDSELK.I | | 542.264 | 2 | 1083.521 | 1083.520 | 0 | 0.3 | 1314 | 459.9 | 402.4 | 402.4 | 7.60 |
| 2161 | K.DRVEQIKEYHHLHQAVHAAK.V | | 482.657 | 5 | 2409.254 | 2409.253 | 0 | 0.1 | 1338 | 496.5 | 496.5 | 496.5 | 7.04 |
| 2161 | K.DRVEQIKEYHHLHQAVHAAK.V | | 402.382 | 6 | 2409.255 | 2409.253 | 0 | 0.8 | 1338 | 495.3 | 495.3 | 495.3 | 7.04 |
| 2161 | K.DRVEQIKEYHHLHQAVHAAK.V | | 402.382 | 6 | 2409.256 | 2409.253 | 0 | 0.8 | 1338 | 323.5 | 323.5 | 323.5 | 4.31 |
| 2161 | K.DRVEQIKEYHHLHQAVHAAK.V | | 482.657 | 5 | 2409.255 | 2409.253 | 0 | 0.6 | 1338 | 313.6 | 313.6 | 313.6 | 4.03 |
| 2161 | K.DRVEQIKEYHHLHQAVHAAK.V | | 402.382 | 6 | 2409.255 | 2409.253 | 0 | 0.5 | 1338 | 304.4 | 226.0 | 226.0 | 3.95 |
| 1892 | R.VEQIKEYHHLHQAVHAAK.V | | 428.431 | 5 | 2138.126 | 2138.125 | 0 | 0.3 | 1340 | 359.7 | 359.7 | 359.7 | 4.64 |
| 1892 | R.VEQIKEYHHLHQAVHAAK.V | | 428.431 | 5 | 2138.128 | 2138.125 | 0 | 1.0 | 1340 | 311.0 | 311.0 | 311.0 | 4.37 |
| 1892 | R.VEQIKEYHHLHQAVHAAK.V | | 428.432 | 5 | 2138.130 | 2138.125 | 0 | 2.0 | 1340 | 301.8 | 301.8 | 301.8 | 3.07 |
| 946 | R.ETLDQINQELIQAK.K | | 821.936 | 2 | 1642.864 | 1642.865 | 0 | −0.3 | 1391 | 619.7 | 619.7 | 619.7 | 10.58 |
| 1077 | R.ETLDQINQELIQAKK.L | | 590.992 | 3 | 1770.960 | 1770.960 | 0 | 0.1 | 1391 | 614.8 | 614.8 | 614.8 | 10.32 |
| 946 | R.ETLDQINQELIQAK.K | | 821.936 | 2 | 1642.865 | 1642.865 | 0 | 0.5 | 1391 | 558.0 | 550.7 | 550.7 | 8.91 |
| 946 | R.ETLDQINQELIQAK.K | | 548.293 | 3 | 1642.866 | 1642.865 | 0 | 0.5 | 1391 | 380.2 | 380.2 | 380.2 | 6.79 |
| 1101 | K.KLLQDISEAR.C | | 586.835 | 2 | 1172.663 | 1172.663 | 0 | 0.0 | 1405 | 604.8 | 514.5 | 514.5 | 9.81 |
| 998 | K.LLQDISEAR.C | | 522.788 | 2 | 1044.568 | 1044.568 | 0 | −0.2 | 1406 | 519.8 | 303.5 | 303.5 | 6.65 |
| 998 | K.LLQDISEAR.C | | 522.788 | 2 | 1044.568 | 1044.568 | 0 | 0.0 | 1406 | 479.9 | 285.6 | 285.6 | 6.44 |
| 4530 | R.EALGGINELKVFVDLASISAGENDIDVDR.V | | 1020.524 | 3 | 3059.556 | 3059.553 | 0 | 0.9 | 1433 | 714.3 | 714.3 | 714.3 | 11.85 |
| 2286 | R.EALGGINELK.V | | 522.290 | 2 | 1043.573 | 1043.573 | 0 | −0.2 | 1433 | 446.4 | 446.4 | 446.4 | 7.80 |
| 2286 | R.EALGGINELK.V | | 522.290 | 2 | 1043.573 | 1043.573 | 0 | −0.6 | 1433 | 455.3 | 455.3 | 455.3 | 7.11 |
| 2191 | K.ALDKDQYLPR.K | | 609.828 | 2 | 1218.648 | 1218.648 | 0 | 0.1 | 1498 | 505.5 | 505.5 | 505.5 | 7.54 |
| 2191 | K.ALDKDQYLPR.K | | 609.828 | 2 | 1218.649 | 1218.648 | 0 | 0.6 | 1498 | 477.5 | 477.5 | 477.5 | 7.54 |
| 2191 | K.ALDKDQYLPR.K | | 406.887 | 3 | 1218.648 | 1218.648 | 0 | −0.1 | 1498 | 467.0 | 467.0 | 467.0 | 7.54 |
| 2191 | K.ALDKDQYLPR.K | | 406.887 | 3 | 1218.648 | 1218.648 | 0 | 0.0 | 1498 | 422.2 | 422.2 | 422.2 | 7.38 |
| 1029 | K.ALDKDQYLPRK.L | | 449.586 | 3 | 1346.743 | 1346.743 | 0 | 0.1 | 1498 | 459.0 | 459.0 | 459.0 | 7.21 |
| 1029 | K.ALDKDQYLPRK.L | | 449.586 | 3 | 1346.743 | 1346.743 | 0 | 0.3 | 1498 | 370.9 | 370.9 | 370.9 | 6.93 |
| 1029 | K.ALDKDQYLPRK.L | | 449.586 | 3 | 1346.743 | 1346.743 | 0 | −0.1 | 1498 | 415.9 | 415.9 | 415.9 | 6.84 |
| 2191 | K.ALDKDQYLPR.K | | 406.888 | 3 | 1218.648 | 1218.648 | 0 | 0.1 | 1498 | 348.7 | 348.7 | 348.7 | 5.60 |
| 832 | R.NLEWLKTVNESHGSVER.S | | 500.257 | 4 | 1998.005 | 1998.004 | 0 | 0.3 | 1515 | 389.5 | 389.5 | 389.5 | 7.47 |
| 832 | R.NLEWLKTVNESHGSVER.S | | 500.256 | 4 | 1998.003 | 1998.004 | 0 | −0.4 | 1515 | 443.4 | 443.4 | 443.4 | 6.83 |
| 832 | R.NLEWLKTVNESHGSVER.S | | 500.256 | 4 | 1998.003 | 1998.004 | 0 | −0.3 | 1515 | 330.2 | 330.2 | 330.2 | 5.99 |
| 2033 | K.TVNESHGSVER.S | | 405.530 | 3 | 1214.577 | 1214.576 | 0 | 0.5 | 1521 | 443.9 | 443.9 | 443.9 | 8.02 |
| 3644 | K.TVNESHGSVERSSLTLATAINQR.G | | 618.321 | 4 | 2470.263 | 2470.265 | 0 | −0.4 | 1521 | 429.9 | 429.9 | 429.9 | 7.59 |
| 3644 | K.TVNESHGSVERSSLTLATAINQR.G | | 618.321 | 4 | 2470.263 | 2470.265 | 0 | −0.4 | 1521 | 308.8 | 308.8 | 308.8 | 5.71 |
| 808 | R.SSLTLATAINQR.G | | 637.857 | 2 | 1274.707 | 1274.706 | 0 | 0.6 | 1532 | 696.8 | 696.8 | 696.8 | 11.58 |
| 808 | R.SSLTLATAINQR.G | | 637.857 | 2 | 1274.707 | 1274.706 | 0 | 0.3 | 1532 | 631.3 | 631.3 | 631.3 | 10.03 |
| 808 | R.SSLTLATAINQR.G | | 637.857 | 2 | 1274.706 | 1274.706 | 0 | −0.1 | 1532 | 524.0 | 524.0 | 524.0 | 8.91 |
| 808 | R.SSLTLATAINQR.G | | 637.857 | 2 | 1274.706 | 1274.706 | 0 | 0.0 | 1532 | 557.1 | 557.1 | 557.1 | 8.14 |
| 808 | R.SSLTLATAINQR.G | | 637.857 | 2 | 1274.707 | 1274.706 | 0 | 0.2 | 1532 | 520.1 | 369.2 | 369.2 | 8.14 |
| 808 | R.SSLTLATAINQR.G | | 637.857 | 2 | 1274.707 | 1274.706 | 0 | 0.2 | 1532 | 472.8 | 472.8 | 472.8 | 7.80 |
| 808 | R.SSLTLATAINQR.G | | 637.857 | 2 | 1274.707 | 1274.706 | 0 | 0.3 | 1532 | 455.7 | 455.7 | 455.7 | 7.80 |
| 808 | R.SSLTLATAINQR.G | | 425.574 | 3 | 1274.706 | 1274.706 | 0 | 0.1 | 1532 | 390.4 | 390.4 | 390.4 | 7.21 |
| 808 | R.SSLTLATAINQR.G | | 637.857 | 2 | 1274.707 | 1274.706 | 0 | 0.5 | 1532 | 353.0 | 353.0 | 353.0 | 6.04 |
| 808 | R.SSLTLATAINQR.G | | 425.908 | 3 | 1275.709 | 1274.706 | 1 | −0.2 | 1532 | 366.8 | 366.8 | 366.8 | 5.20 |
| 847 | R.GIYVIQAPKGGQK.I | | 453.598 | 3 | 1358.779 | 1358.779 | 0 | 0.2 | 1544 | 563.6 | 563.6 | 563.6 | 9.32 |
| 847 | R.GIYVIQAPKGGQK.I | | 679.893 | 2 | 1358.780 | 1358.779 | 0 | 0.3 | 1544 | 515.2 | 515.2 | 515.2 | 8.52 |
| 847 | R.GIYVIQAPKGGQK.I | | 453.598 | 3 | 1358.779 | 1358.779 | 0 | 0.1 | 1544 | 517.4 | 517.4 | 517.4 | 7.97 |
| 813 | R.GIYVIQAPK.G | | 494.795 | 2 | 988.582 | 988.583 | 0 | −0.3 | 1544 | 444.5 | 444.5 | 444.5 | 7.60 |
| 813 | R.GIYVIQAPK.G | | 494.795 | 2 | 988.582 | 988.583 | 0 | −0.3 | 1544 | 439.1 | 439.1 | 439.1 | 7.44 |
| 847 | R.GIYVIQAPKGGQK.I | | 453.598 | 3 | 1358.779 | 1358.779 | 0 | −0.1 | 1544 | 428.6 | 428.6 | 428.6 | 7.18 |
| 1331 | K.ISPDTVLHLILPESPGSHEESR.E | | 604.064 | 4 | 2413.235 | 2413.236 | 0 | −0.3 | 1557 | 581.7 | 562.5 | 562.5 | 9.79 |
| 937 | K.ISPDTVLHLILPESPGSHEESREYSLEEVKELLNK.L | | 798.418 | 5 | 3988.059 | 3988.055 | 0 | 0.9 | 1557 | 392.6 | 392.6 | 392.6 | 6.68 |
| 937 | K.ISPDTVLHLILPESPGSHEESREYSLEEVKELLNK.L | | 1330.025 | 3 | 3988.061 | 3988.055 | 0 | 1.5 | 1557 | 565.9 | 565.9 | 565.9 | 6.62 |
| 937 | K.ISPDTVLHLILPESPGSHEESREYSLEEVKELLNK.L | | 570.586 | 7 | 3988.057 | 3988.055 | 0 | 0.4 | 1557 | 396.5 | 396.5 | 396.5 | 5.72 |
| 937 | K.ISPDTVLHLILPESPGSHEESREYSLEEVKELLNK.L | | 997.770 | 4 | 3988.057 | 3988.055 | 0 | 0.4 | 1557 | 508.5 | 508.5 | 508.5 | 5.59 |
| 937 | K.ISPDTVLHLILPESPGSHEESREYSLEEVKELLNK.L | | 665.515 | 6 | 3988.056 | 3988.055 | 0 | 0.3 | 1557 | 334.0 | 334.0 | 334.0 | 5.17 |
| 937 | K.ISPDTVLHLILPESPGSHEESREYSLEEVKELLNK.L | | 997.769 | 4 | 3988.055 | 3988.055 | 0 | 0.0 | 1557 | 438.9 | 438.9 | 438.9 | 5.03 |
| 937 | K.ISPDTVLHLILPESPGSHEESREYSLEEVKELLNK.L | | 570.586 | 7 | 3988.057 | 3988.055 | 0 | 0.5 | 1557 | 346.6 | 346.6 | 346.6 | 4.63 |
| 937 | K.ISPDTVLHLILPESPGSHEESREYSLEEVKELLNK.L | | 998.018 | 4 | 3989.050 | 3988.055 | 1 | −2.0 | 1557 | 377.4 | 377.4 | 266.1 | 4.00 |
| 982 | R.EYSLEEVKELLNK.L | | 531.950 | 3 | 1593.837 | 1593.837 | 0 | −0.2 | 1579 | 476.1 | 476.1 | 476.1 | 8.31 |
| 3334 | R.FSEVFC[+57.021]SVQR.L | C[+57] | 420.201 | 3 | 1258.589 | 1258.589 | 0 | 0.1 | 1609 | 428.3 | 428.3 | 428.3 | 6.90 |
| 3097 | R.LSQAFIDLHSAGN[+0.984]MLFR.T | N[+1] | 641.333 | 3 | 1921.985 | 1920.964 | 1 | 9.2 | 1619 | 376.3 | 376.3 | 376.3 | 6.16 |
| 3300 | K.EGGDVTELLAALC[+57.021]R.Q | C[+57] | 752.382 | 2 | 1503.757 | 1503.747 | 0 | 6.4 | 1665 | 320.4 | 320.4 | 320.4 | 4.01 |
| 899 | R.KQPPSDAALTMLSFIK.S | | 582.987 | 3 | 1746.946 | 1746.946 | 0 | −0.1 | 1718 | 363.8 | 363.8 | 363.8 | 7.32 |
| 899 | R.KQPPSDAALTMLSFIK.S | | 582.987 | 3 | 1746.945 | 1746.946 | 0 | −0.3 | 1718 | 304.8 | 304.8 | 304.8 | 5.76 |
| 809 | K.QPPSDAALTMLSFIK.S | | 809.930 | 2 | 1618.852 | 1618.851 | 0 | 0.7 | 1719 | 438.5 | 438.5 | 438.5 | 7.86 |
| 809 | K.QPPSDAALTMLSFIK.S | | 540.289 | 3 | 1618.851 | 1618.851 | 0 | 0.0 | 1719 | 431.9 | 431.9 | 431.9 | 7.32 |
| 809 | K.QPPSDAALTMLSFIK.S | | 809.929 | 2 | 1618.851 | 1618.851 | 0 | 0.2 | 1719 | 348.1 | 348.1 | 348.1 | 7.01 |
| 809 | K.QPPSDAALTMLSFIK.S | | 810.430 | 2 | 1619.854 | 1618.851 | 1 | −0.5 | 1719 | 402.5 | 402.5 | 402.5 | 6.72 |
| 809 | K.QPPSDAALTMLSFIK.S | | 540.288 | 3 | 1618.850 | 1618.851 | 0 | −0.4 | 1719 | 415.9 | 415.9 | 415.9 | 6.18 |
| 809 | K.QPPSDAALTMLSFIK.S | | 540.288 | 3 | 1618.850 | 1618.851 | 0 | −0.4 | 1719 | 384.1 | 384.1 | 384.1 | 6.07 |
| 1683 | K.SNC[+57.021]TLRDVLR.A | C[+57] | 411.884 | 3 | 1233.637 | 1233.637 | 0 | 0.1 | 1734 | 320.1 | 320.1 | 320.1 | 5.42 |
| 1312 | R.RVMEELPLMLLSEFSLVDKLR.I | | 630.350 | 4 | 2518.378 | 2518.377 | 0 | 0.4 | 1759 | 622.3 | 622.3 | 622.3 | 10.53 |
| 1633 | R.RVMEELPLM[+15.995]LLSEFSLVDKLR.I | M[+16] | 634.349 | 4 | 2534.375 | 2534.372 | 0 | 1.0 | 1759 | 578.3 | 578.3 | 327.9 | 9.53 |
| 1633 | R.RVMEELPLM[+15.995]LLSEFSLVDKLR.I | M[+16] | 845.463 | 3 | 2534.376 | 2534.372 | 0 | 1.3 | 1759 | 567.8 | 567.8 | 155.0 | 9.53 |
| 1003 | R.RVMEELPLMLLSEFSLVDK.L | | 750.403 | 3 | 2249.193 | 2249.192 | 0 | 0.4 | 1759 | 466.3 | 466.3 | 466.3 | 8.01 |
| 1633 | R.RVMEELPLM[+15.995]LLSEFSLVDKLR.I | M[+16] | 634.349 | 4 | 2534.373 | 2534.372 | 0 | 0.4 | 1759 | 393.9 | 393.9 | 29.8 | 7.27 |
| 1633 | R.RVMEELPLM[+15.995]LLSEFSLVDKLR.I | M[+16] | 845.463 | 3 | 2534.375 | 2534.372 | 0 | 1.1 | 1759 | 306.4 | 306.4 | 176.0 | 5.53 |
| 862 | R.VMEELPLMLLSEFSLVDKLR.I | | 788.097 | 3 | 2362.277 | 2362.276 | 0 | 0.5 | 1760 | 809.2 | 809.2 | 809.2 | 14.54 |
| 1626 | R.VM[+15.995]EELPLMLLSEFSLVDKLR.I | M[+16] | 793.429 | 3 | 2378.272 | 2378.271 | 0 | 0.2 | 1760 | 719.7 | 719.7 | 472.4 | 12.53 |
| 1606 | R.VMEELPLM[+15.995]LLSEFSLVDKLR.I | M[+16] | 595.323 | 4 | 2378.271 | 2378.271 | 0 | 0.1 | 1760 | 704.0 | 704.0 | 365.4 | 11.99 |
| 1626 | R.VM[+15.995]EELPLMLLSEFSLVDKLR.I | M[+16] | 793.429 | 3 | 2378.271 | 2378.271 | 0 | 0.0 | 1760 | 696.2 | 696.2 | 95.5 | 11.53 |
| 1606 | R.VMEELPLM[+15.995]LLSEFSLVDKLR.I | M[+16] | 793.429 | 3 | 2378.273 | 2378.271 | 0 | 0.8 | 1760 | 688.3 | 688.3 | 579.5 | 11.53 |
| 862 | R.VMEELPLMLLSEFSLVDKLR.I | | 788.098 | 3 | 2362.278 | 2362.276 | 0 | 0.8 | 1760 | 686.3 | 686.3 | 686.3 | 11.53 |
| 862 | R.VMEELPLMLLSEFSLVDKLR.I | | 1181.643 | 2 | 2362.278 | 2362.276 | 0 | 0.7 | 1760 | 668.5 | 668.5 | 668.5 | 11.53 |
| 862 | R.VMEELPLMLLSEFSLVDKLR.I | | 788.097 | 3 | 2362.277 | 2362.276 | 0 | 0.3 | 1760 | 665.7 | 665.7 | 665.7 | 11.53 |
| 862 | R.VMEELPLMLLSEFSLVDKLR.I | | 591.325 | 4 | 2362.277 | 2362.276 | 0 | 0.5 | 1760 | 698.6 | 698.6 | 698.6 | 10.99 |
| 862 | R.VMEELPLMLLSEFSLVDKLR.I | | 788.097 | 3 | 2362.278 | 2362.276 | 0 | 0.7 | 1760 | 633.9 | 633.9 | 633.9 | 10.53 |
| 1082 | R.VMEELPLMLLSEFSLVDK.L | | 698.369 | 3 | 2093.092 | 2093.091 | 0 | 0.6 | 1760 | 568.5 | 568.5 | 568.5 | 9.25 |
| 1606 | R.VMEELPLM[+15.995]LLSEFSLVDKLR.I | M[+16] | 1189.641 | 2 | 2378.275 | 2378.271 | 0 | 1.8 | 1760 | 626.0 | 626.0 | 395.8 | 9.23 |
| 1082 | R.VMEELPLMLLSEFSLVDK.L | | 1047.050 | 2 | 2093.092 | 2093.091 | 0 | 0.7 | 1760 | 539.4 | 539.4 | 539.4 | 9.12 |
| 1614 | R.VMEELPLM[+15.995]LLSEFSLVDK.L | M[+16] | 1055.047 | 2 | 2109.087 | 2109.086 | 0 | 0.7 | 1760 | 521.3 | 521.3 | 317.2 | 9.12 |
| 1606 | R.VMEELPLM[+15.995]LLSEFSLVDKLR.I | M[+16] | 793.430 | 3 | 2378.274 | 2378.271 | 0 | 1.2 | 1760 | 561.0 | 561.0 | 315.1 | 8.98 |
| 1626 | R.VM[+15.995]EELPLMLLSEFSLVDKLR.I | M[+16] | 793.429 | 3 | 2378.271 | 2378.271 | 0 | 0.1 | 1760 | 543.4 | 543.4 | 316.7 | 8.86 |
| 1614 | R.VMEELPLM[+15.995]LLSEFSLVDK.L | M[+16] | 703.701 | 3 | 2109.087 | 2109.086 | 0 | 0.6 | 1760 | 517.5 | 517.5 | 351.8 | 8.45 |
| 1529 | R.VM[+15.995]EELPLMLLSEFSLVDK.L | M[+16] | 703.701 | 3 | 2109.088 | 2109.086 | 0 | 1.1 | 1760 | 433.3 | 433.3 | 150.0 | 8.08 |
| 1626 | R.VM[+15.995]EELPLMLLSEFSLVDKLR.I | M[+16] | 793.429 | 3 | 2378.272 | 2378.271 | 0 | 0.4 | 1760 | 475.6 | 475.6 | 87.0 | 7.75 |
| 1626 | R.VM[+15.995]EELPLMLLSEFSLVDKLR.I | M[+16] | 793.429 | 3 | 2378.273 | 2378.271 | 0 | 0.8 | 1760 | 366.7 | 366.7 | 205.6 | 7.09 |
| 834 | R.IIMEQSMR.C | | 504.254 | 2 | 1007.501 | 1007.501 | 0 | −0.2 | 1780 | 504.2 | 504.2 | 504.2 | 8.01 |
| 834 | R.IIMEQSMR.C | | 504.254 | 2 | 1007.501 | 1007.501 | 0 | −0.2 | 1780 | 393.8 | 393.8 | 393.8 | 7.14 |
| 1531 | R.IIM[+15.995]EQSMR.C | M[+16] | 512.252 | 2 | 1023.497 | 1023.496 | 0 | 0.5 | 1780 | 353.6 | 353.6 | 25.9 | 5.58 |
| 1531 | R.IIM[+15.995]EQSMR.C | M[+16] | 512.252 | 2 | 1023.496 | 1023.496 | 0 | −0.1 | 1780 | 323.2 | 323.2 | 34.4 | 5.58 |
| 834 | R.IIMEQSMR.C | | 504.254 | 2 | 1007.501 | 1007.501 | 0 | 0.0 | 1780 | 303.4 | 303.4 | 303.4 | 5.31 |
| 1531 | R.IIM[+15.995]EQSMR.C | M[+16] | 512.252 | 2 | 1023.496 | 1023.496 | 0 | −0.2 | 1780 | 319.0 | 319.0 | 11.0 | 5.18 |
| 834 | R.IIMEQSMR.C | | 504.254 | 2 | 1007.501 | 1007.501 | 0 | −0.6 | 1780 | 314.3 | 314.3 | 314.3 | 4.39 |
| 849 | K.VYSLLFADQLSYEVAR.Q | | 937.489 | 2 | 1873.971 | 1873.969 | 0 | 0.7 | 1891 | 514.6 | 514.6 | 514.6 | 8.78 |
| 849 | K.VYSLLFADQLSYEVAR.Q | | 625.328 | 3 | 1873.971 | 1873.969 | 0 | 0.6 | 1891 | 559.8 | 559.8 | 559.8 | 7.82 |
| 851 | K.VFVTPQAPLEAIQAYLAGHYRVPK.Q | | 667.871 | 4 | 2668.461 | 2668.461 | 0 | 0.1 | 1948 | 812.7 | 812.7 | 812.7 | 14.54 |
| 851 | K.VFVTPQAPLEAIQAYLAGHYRVPK.Q | | 534.498 | 5 | 2668.461 | 2668.461 | 0 | 0.1 | 1948 | 766.5 | 766.5 | 766.5 | 12.99 |
| 1411 | K.VFVTPQAPLEAIQAYLAGHYR.V | | 586.817 | 4 | 2344.245 | 2344.245 | 0 | 0.2 | 1948 | 742.5 | 742.5 | 742.5 | 12.25 |
| 1411 | K.VFVTPQAPLEAIQAYLAGHYR.V | | 782.087 | 3 | 2344.245 | 2344.245 | 0 | 0.2 | 1948 | 677.6 | 677.6 | 677.6 | 11.79 |
| 851 | K.VFVTPQAPLEAIQAYLAGHYRVPK.Q | | 667.871 | 4 | 2668.462 | 2668.461 | 0 | 0.5 | 1948 | 644.9 | 644.9 | 644.9 | 10.53 |
| 959 | K.VFVTPQAPLEAIQAYLAGHYRVPKQTLSAAAVENDR.L | | 789.227 | 5 | 3942.105 | 3942.103 | 0 | 0.7 | 1948 | 510.0 | 510.0 | 510.0 | 6.94 |
| 3778 | R.VPKQTLSAAAVFNDR.L | | 539.630 | 3 | 1616.875 | 1616.876 | 0 | 0.5 | 1969 | 389.4 | 389.4 | 389.4 | 6.15 |
| 814 | K.QTLSAAAVFNDR.L | | 646.834 | 2 | 1292.660 | 1292.659 | 0 | 0.3 | 1972 | 637.3 | 557.2 | 557.2 | 10.58 |
| 814 | K.QTLSAAAVFNDR.L | | 646.833 | 2 | 1292.660 | 1292.659 | 0 | 0.1 | 1972 | 551.7 | 551.7 | 551.7 | 8.91 |
| 814 | K.QTLSAAAVFNDR.L | | 646.834 | 2 | 1292.660 | 1292.659 | 0 | 0.5 | 1972 | 510.1 | 510.1 | 510.1 | 8.78 |
| 814 | K.QTLSAAAVFNDR.L | | 646.833 | 2 | 1292.659 | 1292.659 | 0 | −0.2 | 1972 | 320.6 | 320.6 | 320.6 | 6.04 |
| 3457 | K.MKMQLNVK.N | | 496.275 | 2 | 991.542 | 991.543 | 0 | −0.3 | 2009 | 367.7 | 367.7 | 367.7 | 6.48 |
| 3457 | K.MKMQLNVK.N | | 496.275 | 2 | 991.542 | 991.543 | 0 | −0.3 | 2009 | 333.6 | 333.6 | 333.6 | 5.20 |
| 1244 | R.LIDPQVDESRVLGALLPFLDAQYQK.V | | 943.512 | 3 | 2828.523 | 2828.519 | 0 | 1.1 | 2025 | 616.9 | 616.9 | 616.9 | 10.53 |
| 1244 | R.LIDPQVDESRVLGALLPFLDAQYQK.V | | 707.886 | 4 | 2828.522 | 2828.519 | 0 | 1.1 | 2025 | 375.8 | 375.8 | 375.8 | 7.71 |
| 1009 | R.LIDPQVDESR.V | | 586.301 | 2 | 1171.595 | 1171.595 | 0 | −0.5 | 2025 | 543.6 | 389.6 | 389.6 | 7.45 |
| 1244 | R.LIDPQVDESRVLGALLPFLDAQYQK.V | | 943.513 | 3 | 2828.525 | 2828.519 | 0 | 1.9 | 2025 | 405.5 | 405.5 | 405.5 | 6.09 |
| 871 | R.VLGALLPFLDAQYQK.V | | 838.475 | 2 | 1675.943 | 1675.942 | 0 | 0.5 | 2035 | 496.1 | 496.1 | 496.1 | 8.78 |
| 843 | R.TRVPQFSFLDIFPK.V | | 565.647 | 3 | 1694.927 | 1694.927 | 0 | 0.5 | 2116 | 491.0 | 491.0 | 491.0 | 7.97 |
| 843 | R.TRVPQFSFLDIFPK.V | | 565.647 | 3 | 1694.927 | 1694.927 | 0 | 0.3 | 2116 | 464.6 | 464.6 | 464.6 | 7.76 |
| 843 | R.TRVPQFSFLDIFPK.V | | 565.647 | 3 | 1694.926 | 1694.927 | 0 | −0.1 | 2116 | 452.6 | 452.6 | 452.6 | 7.76 |
| 843 | R.TRVPQFSFLDIFPK.V | | 565.648 | 3 | 1694.928 | 1694.927 | 0 | 1.1 | 2116 | 446.1 | 446.1 | 446.1 | 7.76 |
| 843 | R.TRVPQFSFLDIFPK.V | | 565.647 | 3 | 1694.927 | 1694.927 | 0 | 0.3 | 2116 | 401.6 | 401.6 | 401.6 | 7.38 |
| 843 | R.TRVPQFSFLDIFPK.V | | 565.648 | 3 | 1694.928 | 1694.927 | 0 | 0.8 | 2116 | 379.6 | 379.6 | 379.6 | 7.27 |
| 843 | R.TRVPQFSFLDIFPK.V | | 847.966 | 2 | 1694.926 | 1694.927 | 0 | −0.5 | 2116 | 454.4 | 454.4 | 454.4 | 6.63 |
| 843 | R.TRVPQFSFLDIFPK.V | | 847.966 | 2 | 1694.926 | 1694.927 | 0 | −0.5 | 2116 | 453.6 | 453.6 | 453.6 | 6.63 |
| 843 | R.TRVPQFSFLDIFPK.V | | 847.966 | 2 | 1694.926 | 1694.927 | 0 | −0.6 | 2116 | 420.9 | 420.9 | 420.9 | 6.46 |
| 843 | R.TRVPQFSFLDIFPK.V | | 565.647 | 3 | 1694.925 | 1694.927 | 0 | −0.7 | 2116 | 363.0 | 363.0 | 363.0 | 6.35 |
| 843 | R.TRVPQFSFLDIFPK.V | | 565.647 | 3 | 1694.927 | 1694.927 | 0 | 0.3 | 2116 | 340.4 | 340.4 | 340.4 | 5.98 |
| 843 | R.TRVPQFSFLDIFPK.V | | 565.647 | 3 | 1694.927 | 1694.927 | 0 | 0.4 | 2116 | 324.7 | 324.7 | 324.7 | 5.98 |
| 843 | R.TRVPQFSFLDIFPK.V | | 847.967 | 2 | 1694.927 | 1694.927 | 0 | 0.3 | 2116 | 308.7 | 270.3 | 270.3 | 5.21 |
| 830 | R.VPQFSFLDIFPK.V | | 719.393 | 2 | 1437.779 | 1437.778 | 0 | 0.8 | 2118 | 581.6 | 581.6 | 581.6 | 9.58 |
| 830 | R.VPQFSFLDIFPK.V | | 719.393 | 2 | 1437.779 | 1437.778 | 0 | 1.0 | 2118 | 403.5 | 403.5 | 403.5 | 7.86 |
| 830 | R.VPQFSFLDIFPK.V | | 719.393 | 2 | 1437.778 | 1437.778 | 0 | 0.1 | 2118 | 423.2 | 423.2 | 423.2 | 7.64 |
| 830 | R.VPQFSFLDIFPK.V | | 479.931 | 3 | 1437.778 | 1437.778 | 0 | 0.2 | 2118 | 454.7 | 454.7 | 454.7 | 7.26 |
| 830 | R.VPQFSFLDIFPK.V | | 479.931 | 3 | 1437.777 | 1437.778 | 0 | −0.2 | 2118 | 431.7 | 431.7 | 431.7 | 7.10 |
| 830 | R.VPQFSFLDIFPK.V | | 719.394 | 2 | 1437.780 | 1437.778 | 0 | 1.6 | 2118 | 317.5 | 317.5 | 317.5 | 5.97 |
| 830 | R.VPQFSFLDIFPK.V | | 719.393 | 2 | 1437.779 | 1437.778 | 0 | 1.1 | 2118 | 318.6 | 318.6 | 318.6 | 5.76 |
| 1691 | K.VTC[+57.021]RPPKEVIDMELSALR.S | C[+57] | 705.375 | 3 | 2114.109 | 2114.110 | 0 | −0.2 | 2130 | 554.5 | 554.5 | 554.5 | 8.86 |
| 1691 | K.VTC[+57.021]RPPKEVIDMELSALR.S | C[+57 | 529.283 | 4 | 2114.110 | 2114.110 | 0 | 0.0 | 2130 | 346.1 | 346.1 | 346.1 | 6.19 |
| 1691 | K.VTC[+57.021]RPPKEVIDMELSALR.S | C[+57] | 529.283 | 4 | 2114.110 | 2114.110 | 0 | 0.0 | 2130 | 330.3 | 330.3 | 330.3 | 5.99 |
| 1740 | R.SDTEPGMDLWEFC[+57.021]SETFQRPYQYLR.R | C[+57] | 789.604 | 4 | 3155.392 | 3155.387 | 0 | 1.6 | 2148 | 601.8 | 596.6 | 596.6 | 9.70 |
| 1740 | R.SDTEPGMDLWEFC[+57.021]SETFQRPYQYLR.R | C[+57] | 1052.469 | 3 | 3155.393 | 3155.387 | 0 | 1.6 | 2148 | 555.1 | 555.1 | 555.1 | 8.57 |
| 1740 | R.SDTEPGMDLWEFC[+57.021]SETFQRPYQYLR.R | C[+57] | 789.604 | 4 | 3155.392 | 3155.387 | 0 | 1.6 | 2148 | 525.5 | 525.5 | 525.5 | 8.03 |
| 3308 | R.SDTEPGMDLWEFC[+57.021]SETFQRPYQYLRR.F | C[+57] | 828.628 | 4 | 3311.491 | 3311.489 | 0 | 0.7 | 2148 | 326.1 | 267.5 | 267.5 | 5.23 |
| 1773 | R.FLNYQLR.D | | 477.264 | 2 | 953.521 | 953.520 | 0 | 0.2 | 2221 | 433.5 | 433.5 | 433.5 | 7.26 |
| 1773 | R.FLNYQLR.D | | 477.264 | 2 | 953.520 | 953.520 | 0 | 0.0 | 2221 | 370.7 | 370.7 | 370.7 | 7.14 |
| 1773 | R.FLNYQLR.D | | 477.264 | 2 | 953.521 | 953.520 | 0 | 0.2 | 2221 | 341.8 | 341.8 | 341.8 | 5.58 |
| 1773 | R.FLNYQLR.D | | 477.264 | 2 | 953.520 | 953.520 | 0 | 0.0 | 2221 | 341.2 | 341.2 | 341.2 | 5.58 |
| 1773 | R.FLNYQLR.D | | 477.264 | 2 | 953.520 | 953.520 | 0 | 0.1 | 2221 | 368.5 | 253.8 | 253.8 | 5.39 |
| 1773 | R.FLNYQLR.D | | 477.264 | 2 | 953.520 | 953.520 | 0 | 0.0 | 2221 | 347.3 | 225.7 | 225.7 | 5.32 |
| 3202 | K.HMVTM[+15.995]DGVREEDLAPFSLR.K | M[+16] | 740.358 | 3 | 2219.058 | 2219.058 | 0 | −0.1 | 2277 | 477.5 | 477.5 | 276.8 | 8.52 |
| 1883 | K.HMVTMDGVREEDLAPFSLRK.R | | 583.545 | 4 | 2331.158 | 2331.158 | 0 | 0.0 | 2277 | 405.5 | 405.5 | 405.5 | 7.47 |
| 1088 | K.HMVTMDGVREEDLAPFSLR.K | | 1102.035 | 2 | 2203.063 | 2203.063 | 0 | −0.1 | 2277 | 420.8 | 420.8 | 420.8 | 6.47 |
| 1883 | K.HMVTMDGVREEDLAPFSLRK.R | | 467.038 | 5 | 2331.158 | 2331.158 | 0 | 0.0 | 2277 | 356.8 | 356.8 | 356.8 | 5.85 |
| 1088 | K.HMVTMDGVREEDLAPFSLR.K | | 1102.035 | 2 | 2203.063 | 2203.063 | 0 | −0.4 | 2277 | 333.7 | 333.7 | 333.7 | 5.07 |
| 1121 | R.EEDLAPFSLRK.R | | 435.566 | 3 | 1304.685 | 1304.685 | 0 | 0.1 | 2286 | 579.5 | 579.5 | 579.5 | 9.32 |
| 930 | R.EEDLAPFSLR.K | | 588.798 | 2 | 1176.589 | 1176.590 | 0 | −0.2 | 2286 | 471.9 | 471.9 | 471.9 | 7.80 |
| 930 | R.EEDLAPFSLR.K | | 588.799 | 2 | 1176.590 | 1176.590 | 0 | 0.6 | 2286 | 426.4 | 420.4 | 420.4 | 7.64 |
| 1121 | R.EEDLAPFSLRK.R | | 652.846 | 2 | 1304.685 | 1304.685 | 0 | 0.3 | 2286 | 475.3 | 475.3 | 475.3 | 7.54 |
| 3179 | R.KRWESEPHPYVFFNDDHTTM[+15.995]TFIGFHLQPNINGS | M[+16] | 729.357 | 7 | 5099.458 | 5099.453 | 0 | 0.9 | 2296 | 371.0 | 371.0 | 371.0 | 6.03 |
| | VDAISHLTGK.V | | | | | | | | | | | | |
| 1186 | K.RWESEPHPYVFFNDDHTTMTFIGFHLQPNINGSVDAISHLTGK. | | 708.773 | 7 | 4955.369 | 4955.364 | 0 | 1.1 | 2297 | 530.0 | 530.0 | 530.0 | 7.29 |
| | V | | | | | | | | | | | | |
| 1186 | K.RWESEPHPYVFFNDDHTTMTFIGFHLQPNINGSVDAISHLTGK. | | 708.773 | 7 | 4955.369 | 4955.364 | 0 | 1.1 | 2297 | 483.7 | 483.7 | 483.7 | 7.15 |
| | V | | | | | | | | | | | | |
| 840 | R.WESEPHPYVFFNDDHTTMTFIGFHLQPNINGSVDAISHLTGK.V | | 960.659 | 5 | 4799.265 | 4799.262 | 0 | 0.5 | 2298 | 876.5 | 876.5 | 876.5 | 14.72 |
| 840 | R.WESEPHPYVFFNDDHTTMTFIGFHLQPNINGSVDAISHLTGK.V | | 960.659 | 5 | 4799.265 | 4799.262 | 0 | 0.6 | 2298 | 838.7 | 838.7 | 838.7 | 13.73 |
| 840 | R.WESEPHPYVFFNDDHTTMTFIGFHLQPNINGSVDAISHLTGK.V | | 800.717 | 6 | 4799.264 | 4799.262 | 0 | 0.4 | 2298 | 687.9 | 687.9 | 687.9 | 10.73 |
| 840 | R.WESEPHPYVFFNDDHTTMTFIGFHLQPNINGSVDAISHLTGK.V | | 800.717 | 6 | 4799.263 | 4799.262 | 0 | 0.2 | 2298 | 623.1 | 623.1 | 623.1 | 9.73 |
| 840 | R.WESEPHPYVFFNDDHTTMTFIGFHLQPNINGSVDAISHLTGK.V | | 800.881 | 6 | 4800.248 | 4799.262 | 1 | −3.8 | 2298 | 635.0 | 612.1 | 8.8 | 7.66 |
| 3120 | R.WESEPHPYVFFNDDHTTMTFIGFHLQPN[+0.984]INGSVDAI | N[+1] | 800.884 | 6 | 4800.266 | 4800.246 | 0 | 4.0 | 2298 | 550.8 | 550.8 | 22.2 | 5.68 |
| | SHLTGK.V | | | | | | | | | | | | |
| 840 | R.WESEPHPYVFFNDDHTTMTFIGFHLQPNINGSVDAISHLTGK.V | | 960.656 | 5 | 4799.250 | 4799.262 | 0 | −2.6 | 2298 | 486.6 | 343.0 | 343.0 | 4.26 |
| 868 | R.DVMTRDLYQGLLLQR.V | | 607.661 | 3 | 1820.970 | 1820.969 | 0 | 0.5 | 2344 | 517.2 | 517.2 | 517.2 | 8.52 |
| 1068 | R.DLYQGLLLQRVPFNVDFDKLPR.H | | 882.818 | 3 | 2646.440 | 2646.440 | 0 | −0.1 | 2349 | 811.9 | 811.9 | 811.9 | 14.19 |
| 984 | R.DLYQGLLLQR.V | | 609.846 | 2 | 1218.684 | 1218.684 | 0 | 0.2 | 2349 | 612.6 | 612.6 | 612.6 | 10.58 |
| 984 | R.DLYQGLLLQR.V | | 609.846 | 2 | 1218.684 | 1218.684 | 0 | 0.2 | 2349 | 611.2 | 611.2 | 611.2 | 10.58 |
| 1068 | R.DLYQGLLLQRVPFNVDFDKLPR.H | | 882.819 | 3 | 2646.442 | 2646.440 | 0 | 0.6 | 2349 | 594.5 | 594.5 | 594.5 | 9.19 |
| 1068 | R.DLYQGLLLQRVPFNVDFDKLPR.H | | 662.366 | 4 | 2646.442 | 2646.440 | 0 | 0.5 | 2349 | 562.3 | 562.3 | 562.3 | 9.19 |
| 1068 | R.DLYQGLLLQRVPFNVDFDKLPR.H | | 530.094 | 5 | 2646.442 | 2646.440 | 0 | 0.5 | 2349 | 561.6 | 561.6 | 561.6 | 8.65 |
| 1068 | R.DLYQGLLLQRVPFNVDFDKLPR.H | | 662.366 | 4 | 2646.442 | 2646.440 | 0 | 0.5 | 2349 | 548.9 | 548.9 | 548.9 | 8.52 |
| 984 | R.DLYQGLLLQR.V | | 406.900 | 3 | 1218.684 | 1218.684 | 0 | 0.3 | 2349 | 478.2 | 478.2 | 478.2 | 8.03 |
| 984 | R.DLYQGLLLQR.V | | 406.900 | 3 | 1218.684 | 1218.684 | 0 | 0.0 | 2349 | 519.3 | 519.3 | 519.3 | 7.69 |
| 841 | R.VPFNVDFDKLPR.H | | 482.930 | 3 | 1446.774 | 1446.774 | 0 | −0.1 | 2359 | 605.7 | 605.7 | 605.7 | 10.32 |
| 841 | R.VPFNVDFDKLPR.H | | 482.930 | 3 | 1446.774 | 1446.774 | 0 | 0.0 | 2359 | 575.8 | 575.8 | 575.8 | 9.32 |
| 841 | R.VPFNVDFDKLPR.H | | 723.891 | 2 | 1446.774 | 1446.774 | 0 | 0.3 | 2359 | 538.1 | 538.1 | 538.1 | 8.65 |
| 841 | R.VPFNVDFDKLPR.H | | 723.891 | 2 | 1446.774 | 1446.774 | 0 | 0.1 | 2359 | 490.5 | 490.5 | 490.5 | 8.52 |
| 841 | R.VPFNVDFDKLPR.H | | 482.930 | 3 | 1446.774 | 1446.774 | 0 | −0.1 | 2359 | 521.5 | 521.5 | 521.5 | 8.10 |
| 841 | R.VPFNVDFDKLPR.H | | 723.891 | 2 | 1446.774 | 1446.774 | 0 | −0.1 | 2359 | 1348.1 | 348.1 | 348.1 | 5.98 |
| 841 | R.VPFNVDFDKLPR.H | | 482.929 | 3 | 1446.774 | 1446.774 | 0 | −0.3 | 2359 | 334.0 | 213.9 | 213.9 | 5.34 |
| 1748 | R.LC[+57.021]LTLGIPQATDPDKTYELTTDNMLK.I | C[+57] | 984.496 | 3 | 2951.475 | 2951.474 | 0 | 0.2 | 2377 | 620.4 | 620.4 | 620.4 | 10.53 |
| 1748 | R.LC[+57.021]LTLGIPQATDPDKTYELTTDNMLK.I | C[+57] | 738.624 | 4 | 2951.476 | 2951.474 | 0 | 0.5 | 2377 | 466.5 | 466.5 | 466.5 | 7.21 |
| 1798 | K.ILAIEMR.F | | 423.249 | 2 | 845.491 | 845.491 | 0 | 0.1 | 2403 | 467.5 | 467.5 | 467.5 | 7.42 |
| 1798 | K.ILAIEMR.F | | 423.249 | 2 | 845.491 | 845.491 | 0 | −0.2 | 2403 | 424.7 | 424.7 | 424.7 | 7.26 |
| 1570 | K.ILAIEM[+15.995]R.F | M[+16] | 431.247 | 2 | 861.486 | 861.486 | 0 | −0.4 | 2403 | 330.5 | 330.5 | 330.5 | 5.58 |
| 3975 | R.LIKFLSDLRR.G | | 420.931 | 3 | 1260.779 | 1260.779 | 0 | 0.0 | 2429 | 462.1 | 462.1 | 462.1 | 7.21 |
| 1781 | K.FLSDLRR.G | | 453.762 | 2 | 906.516 | 906.516 | 0 | 0.2 | 2432 | 378.2 | 265.9 | 265.9 | 5.13 |
| 2259 | R.GGTNADTIKLVK.V | | 608.848 | 2 | 1216.690 | 1216.690 | 0 | 0.0 | 2439 | 620.2 | 442.6 | 442.6 | 9.77 |
| 1506 | R.GGTN[+0.984]ADTIKLVK.V | N[+1] | 406.563 | 3 | 1217.674 | 1217.674 | 0 | 0.0 | 2439 | 474.1 | 351.9 | 351.9 | 6.59 |
| 866 | K.VHGGTTADMIYSR.V | | 704.338 | 2 | 1407.668 | 1407.669 | 0 | −0.2 | 2451 | 667.2 | 667.2 | 667.2 | 11.58 |
| 1538 | K.VHGGTTADM[+15.995]IYSR.V | M[+16] | 712.336 | 2 | 1423.664 | 1423.663 | 0 | 0.4 | 2451 | 603.6 | 603.6 | 603.6 | 10.58 |
| 1538 | K.VHGGTTADM[+15.995]IYSR.V | M[+16] | 475.226 | 3 | 1423.664 | 1423.663 | 0 | 0.2 | 2451 | 504.3 | 504.3 | 504.3 | 8.23 |
| 866 | K.VHGGTTADMIYSR.V | | 469.894 | 3 | 1407.669 | 1407.669 | 0 | 0.0 | 2451 | 471.5 | 471.5 | 471.5 | 8.02 |
| 866 | K.VHGGTTADMIYSR.V | | 469.894 | 3 | 1407.668 | 1407.669 | 0 | −0.2 | 2451 | 465.6 | 465.6 | 465.6 | 8.02 |
| 866 | K.VHGGTTADMIYSR.V | | 469.894 | 3 | 1407.668 | 1407.669 | 0 | −0.3 | 2451 | 452.8 | 452.8 | 452.8 | 8.02 |
| 866 | K.VHGGTTADMIYSR.V | | 704.338 | 2 | 1407.668 | 1407.669 | 0 | −0.2 | 2451 | 442.9 | 442.9 | 442.9 | 8.02 |
| 866 | K.VHGGTTADMIYSR.V | | 469.894 | 3 | 1407.668 | 1407.669 | 0 | −0.2 | 2451 | 424.9 | 424.9 | 424.9 | 7.86 |
| 866 | K.VHGGTTADMIYSR.V | | 469.894 | 3 | 1407.668 | 1407.669 | 0 | −0.3 | 2451 | 461.0 | 461.0 | 461.0 | 7.80 |
| 1538 | K.VHGGTTADM[+15.995]IYSR.V | M[+16] | 475.226 | 3 | 1423.664 | 1423.663 | 0 | 0.6 | 2451 | 458.9 | 458.9 | 458.9 | 7.80 |
| 1538 | K.VHGGTTADM[+15.995]IYSR.V | M[+16] | 475.226 | 3 | 1423.664 | 1423.663 | 0 | 0.2 | 2451 | 431.0 | 431.0 | 431.0 | 7.64 |
| 866 | K.VHGGTTADMIYSR.V | | 469.894 | 3 | 1407.668 | 1407.669 | 0 | −0.3 | 2451 | 404.7 | 404.7 | 404.7 | 7.64 |
| 1538 | K.VHGGTTADM[+15.995]IYSR.V | M[+16] | 475.226 | 3 | 1423.664 | 1423.663 | 0 | 0.2 | 2451 | 380.7 | 380.7 | 380.7 | 7.53 |
| 1538 | K.VHGGTTADM[+15.995]IYSR.V | M[+16] | 475.226 | 3 | 1423.664 | 1423.663 | 0 | 0.5 | 2451 | 416.6 | 416.6 | 416.6 | 7.44 |
| 866 | K.VHGGTTADMIYSR.V | | 469.895 | 3 | 1407.669 | 1407.669 | 0 | 0.2 | 2451 | 414.9 | 414.9 | 414.9 | 7.44 |
| 866 | K.VHGGTTADMIYSR.V | | 469.894 | 3 | 1407.668 | 1407.669 | 0 | −0.3 | 2451 | 386.6 | 386.6 | 386.6 | 7.32 |
| 1538 | K.VHGGTTADM[+15.995]IYSR.V | M[+16] | 475.226 | 3 | 1423.663 | 1423.663 | 0 | −0.2 | 2451 | 369.4 | 369.4 | 369.4 | 7.14 |
| 1538 | K.VHGGTTADM[+15.995]IYSR.V | M[+16] | 475.226 | 3 | 1423.663 | 1423.663 | 0 | −0.5 | 2451 | 377.6 | 377.6 | 377.6 | 6.22 |
| 866 | K.VHGGTTADMIYSR.V | | 469.895 | 3 | 1407.669 | 1407.669 | 0 | 0.4 | 2451 | 340.1 | 340.1 | 340.1 | 6.04 |
| 1538 | K.VHGGTTADM[+15.995]IYSR.V | M[+16] | 475.226 | 3 | 1423.664 | 1423.663 | 0 | 0.2 | 2451 | 348.0 | 348.0 | 348.0 | 5.86 |
| 866 | K.VHGGTTADMIYSR.V | | 469.895 | 3 | 1407.669 | 1407.669 | 0 | 0.4 | 2451 | 337.1 | 337.1 | 337.1 | 5.86 |
| 866 | K.VHGGTTADMIYSR.V | | 469.894 | 3 | 1407.668 | 1407.669 | 0 | −0.5 | 2451 | 338.2 | 338.2 | 338.2 | 5.12 |
| 1538 | K.VHGGTTADM[+15.995]IYSR.V | M[+16] | 475.226 | 3 | 1423.663 | 1423.663 | 0 | −0.4 | 2451 | 375.9 | 353.3 | 353.3 | 5.05 |
| 1538 | K.VHGGTTADM[+15.995]IYSR.V | M[+16] | 475.226 | 3 | 1423.663 | 1423.663 | 0 | −0.5 | 2451 | 312.0 | 312.0 | 312.0 | 4.39 |
| 866 | K.VHGGTTADMIYSR.V | | 704.334 | 2 | 1407.661 | 1407.669 | 0 | −5.2 | 2451 | 319.3 | 319.3 | 319.3 | 4.13 |
| 1926 | R.VREAENVAFANK.D | | 449.905 | 3 | 1347.702 | 1347.702 | 0 | 0.1 | 2464 | 431.2 | 431.2 | 431.2 | 7.38 |
| 890 | R.LESAGLGYR.V | | 483.256 | 2 | 965.505 | 965.505 | 0 | 0.1 | 2538 | 569.3 | 569.3 | 569.3 | 8.81 |
| 890 | R.LESAGLGYR.V | | 483.256 | 2 | 965.505 | 965.505 | 0 | −0.1 | 2538 | 550.5 | 550.5 | 550.5 | 8.14 |
| 890 | R.LESAGLGYR.V | | 483.256 | 2 | 965.505 | 965.505 | 0 | −0.1 | 2538 | 523.0 | 523.0 | 523.0 | 8.14 |
| 890 | R.LESAGLGYR.V | | 483.256 | 2 | 965.505 | 965.505 | 0 | −0.1 | 2538 | 515.2 | 515.2 | 515.2 | 8.01 |
| 890 | R.LESAGLGYR.V | | 483.256 | 2 | 965.505 | 965.505 | 0 | −0.2 | 2538 | 483.2 | 483.2 | 483.2 | 8.01 |
| 890 | R.LESAGLGYR.V | | 483.256 | 2 | 965.505 | 965.505 | 0 | −0.1 | 2538 | 484.9 | 484.9 | 484.9 | 7.80 |
| 890 | R.LESAGLGYR.V | | 483.256 | 2 | 965.505 | 965.505 | 0 | −0.2 | 2538 | 400.8 | 400.8 | 400.8 | 7.44 |
| 890 | R.LESAGLGYR.V | | 483.256 | 2 | 965.505 | 965.505 | 0 | −0.2 | 2538 | 397.0 | 397.0 | 397.0 | 7.14 |
| 890 | R.LESAGLGYR.V | | 483.256 | 2 | 965.505 | 965.505 | 0 | −0.1 | 2538 | 307.6 | 307.6 | 307.6 | 5.31 |
| 1190 | R.VSMEETADRLGSIPLR.Q | | 591.977 | 3 | 1773.917 | 1773.916 | 0 | 0.4 | 2547 | 608.8 | 608.8 | 608.8 | 10.32 |
| 1190 | R.VSMEETADRLGSIPLR.Q | | 591.977 | 3 | 1773.916 | 1773.916 | 0 | −0.1 | 2547 | 515.9 | 515.9 | 515.9 | 7.97 |
| 1190 | R.VSMEETADRLGSIPLR.Q | | 591.977 | 3 | 1773.917 | 1773.916 | 0 | 0.3 | 2547 | 493.3 | 493.3 | 493.3 | 7.97 |
| 1587 | R.VSM[+15.995]EETADRLGSIPLR.Q | M[+16] | 597.309 | 3 | 1789.911 | 1789.911 | 0 | 0.0 | 2547 | 464.7 | 464.7 | 464.7 | 7.54 |
| 1587 | R.VSM[+15.995]EETADRLGSIPLR.Q | M[+16] | 597.308 | 3 | 1789.910 | 1789.911 | 0 | −0.5 | 2547 | 471.8 | 471.8 | 471.8 | 6.85 |
| 3537 | R.VSMEETADRLGSIPLRQLVYR.V | | 811.769 | 3 | 2433.293 | 2433.292 | 0 | 0.4 | 2547 | 315.9 | 315.9 | 315.9 | 5.19 |
| 1547 | R.VSM[+15.995]EETADR.L | M[+16] | 527.229 | 2 | 1053.451 | 1053.452 | 0 | −0.6 | 2547 | 345.5 | 345.5 | 345.5 | 4.66 |
| 2512 | R.LGSIPLRQLVYR.V | | 472.289 | 3 | 1414.853 | 1414.853 | 0 | −0.2 | 2556 | 551.9 | 551.9 | 551.9 | 8.10 |
| 2512 | R.LGSIPLRQLVYR.V | | 472.289 | 3 | 1414.852 | 1414.853 | 0 | −0.4 | 2556 | 420.6 | 420.6 | 420.6 | 7.60 |
| 1234 | R.VHALPPSLIPLVWDFGQLSDVAEKLYIQQIVQR.L | | 755.422 | 5 | 3773.083 | 3773.079 | 0 | 1.1 | 2568 | 749.6 | 749.6 | 749.6 | 11.32 |
| 1234 | R.VHALPPSLIPLVWDFGQLSDVAEKLYIQQIVQR.L | | 755.422 | 5 | 3773.079 | 3773.079 | 0 | 0.1 | 2568 | 705.1 | 705.1 | 705.1 | 11.32 |
| 1234 | R.VHALPPSLIPLVWDFGQLSDVAEKLYIQQIVQR.L | | 944.027 | 4 | 3773.084 | 3773.079 | 0 | 1.4 | 2568 | 642.5 | 642.5 | 642.5 | 9.85 |
| 981 | K.LYIQQIVQR.L | | 580.843 | 2 | 1160.678 | 1160.679 | 0 | −0.2 | 2592 | 540.5 | 540.5 | 540.5 | 8.36 |
| 981 | K.LYIQQIVQR.L | | 580.843 | 2 | 1160.678 | 1160.679 | 0 | −0.2 | 2592 | 448.3 | 448.3 | 448.3 | 8.02 |
| 2006 | R.LVESISLDENGTR.V | | 716.867 | 2 | 1432.727 | 1432.728 | 0 | −0.4 | 2601 | 531.9 | 531.9 | 531.9 | 7.99 |
| 2006 | R.LVESISLDENGTR.V | | 478.582 | 3 | 1433.730 | 1432.728 | 1 | −0.6 | 2601 | 405.3 | 358.1 | 358.1 | 3.44 |
| 883 | R.FFPKPYDDSRLLLDEITR.A | | 742.392 | 3 | 2225.160 | 2225.160 | 0 | −0.1 | 2710 | 489.7 | 489.7 | 489.7 | 8.72 |
| 883 | R.FFPKPYDDSRLLLDEITR.A | | 742.392 | 3 | 2225.160 | 2225.160 | 0 | −0.1 | 2710 | 448.8 | 448.8 | 448.8 | 8.52 |
| 883 | R.FFPKPYDDSRLLLDEITR.A | | 557.046 | 4 | 2225.160 | 2225.160 | 0 | 0.0 | 2710 | 425.3 | 425.3 | 425.3 | 8.36 |
| 883 | R.FFPKPYDDSRLLLDEITR.A | | 557.045 | 4 | 2225.160 | 2225.160 | 0 | −0.1 | 2710 | 416.7 | 416.7 | 416.7 | 8.36 |
| 938 | R.FFPKPYDDSR.L | | 636.306 | 2 | 1271.605 | 1271.606 | 0 | −0.1 | 2710 | 486.0 | 486.0 | 486.0 | 7.80 |
| 938 | R.FFPKPYDDSR.L | | 636.307 | 2 | 1271.606 | 1271.606 | 0 | 0.2 | 2710 | 439.0 | 439.0 | 439.0 | 7.44 |
| 938 | R.FFPKPYDDSR.L | | 424.540 | 3 | 1271.605 | 1271.606 | 0 | −0.5 | 2710 | 370.2 | 370.2 | 370.2 | 6.22 |
| 883 | R.FFPKPYDDSRLLLDEITR.A | | 557.297 | 4 | 2226.164 | 2225.160 | 1 | 0.3 | 2710 | 354.7 | 354.7 | 354.7 | 6.19 |
| 938 | R.FFPKPYDDSR.L | | 424.540 | 3 | 1271.606 | 1271.606 | 0 | 0.1 | 2710 | 358.6 | 358.6 | 358.6 | 6.04 |
| 938 | R.FFPKPYDDSR.L | | 424.540 | 3 | 1271.606 | 1271.606 | 0 | 0.2 | 2710 | 346.3 | 346.3 | 346.3 | 5.86 |
| 938 | R.FFPKPYDDSR.L | | 424.540 | 3 | 1271.606 | 1271.606 | 0 | 0.2 | 2710 | 335.2 | 335.2 | 335.2 | 5.86 |
| 938 | R.FFPKPYDDSR.L | | 424.540 | 3 | 1271.605 | 1271.606 | 0 | −0.1 | 2710 | 333.9 | 333.9 | 333.9 | 5.86 |
| 938 | R.FFPKPYDDSR.L | | 424.540 | 3 | 1271.605 | 1271.606 | 0 | −0.5 | 2710 | 339.0 | 339.0 | 339.0 | 5.58 |
| 902 | R.LLLDEITRAQDLFLDGVPLRK.T | | 809.132 | 3 | 2425.383 | 2425.381 | 0 | 0.6 | 2720 | 719.5 | 719.5 | 719.5 | 12.19 |
| 1256 | R.LLLDEITRAQDLFLDGVPLR.K | | 766.769 | 3 | 2298.291 | 2297.286 | 1 | 0.7 | 2720 | 518.8 | 518.8 | 518.8 | 8.72 |
| 902 | R.LLLDEITRAQDLFLDGVPLRK.T | | 607.101 | 4 | 2425.382 | 2425.381 | 0 | 0.1 | 2720 | 408.6 | 408.6 | 408.6 | 7.47 |
| 2028 | R.LLLDEITR.A | | 486.790 | 2 | 972.573 | 972.572 | 0 | 0.2 | 2720 | 450.2 | 450.2 | 450.2 | 7.42 |
| 902 | R.LLLDEITRAQDLFLDGVPLRK.T | | 607.101 | 4 | 2425.382 | 2425.381 | 0 | 0.3 | 2720 | 382.0 | 382.0 | 382.0 | 7.36 |
| 2028 | R.LLLDEITR.A | | 486.790 | 2 | 972.572 | 972.572 | 0 | −0.2 | 2720 | 361.0 | 361.0 | 361.0 | 7.32 |
| 2028 | R.LLLDEITR.A | | 486.790 | 2 | 972.573 | 972.572 | 0 | 0.4 | 2720 | 398.4 | 398.4 | 398.4 | 7.14 |
| 1256 | R.LLLDEITRAQDLFLDGVPLR.K | | 766.434 | 3 | 2297.288 | 2297.286 | 0 | 0.6 | 2720 | 350.2 | 350.2 | 350.2 | 6.19 |
| 902 | R.LLLDEITRAQDLFLDGVPLRK.T | | 809.133 | 3 | 2425.383 | 2425.381 | 0 | 0.6 | 2720 | 348.5 | 348.5 | 348.5 | 5.47 |
| 902 | R.LLLDEITRAQDLFLDGVPLRK.T | | 485.882 | 5 | 2425.382 | 2425.381 | 0 | 0.3 | 2720 | 341.0 | 341.0 | 341.0 | 5.31 |
| 922 | R.AQDLFLDGVPLRK.T | | 491.280 | 3 | 1471.827 | 1471.827 | 0 | −0.1 | 2728 | 641.8 | 641.8 | 641.8 | 10.32 |
| 922 | R.AQDLFLDGVPLRK.T | | 491.280 | 3 | 1471.827 | 1471.827 | 0 | −0.2 | 2728 | 613.2 | 613.2 | 613.2 | 10.32 |
| 1189 | R.AQDLFLDGVPLR.K | | 672.370 | 2 | 1343.732 | 1343.732 | 0 | 0.1 | 2728 | 584.0 | 584.0 | 584.0 | 9.58 |
| 1189 | R.AQDLFLDGVPLR.K | | 672.369 | 2 | 1343.732 | 1343.732 | 0 | −0.1 | 2728 | 577.6 | 577.6 | 577.6 | 9.58 |
| 922 | R.AQDLFLDGVPLRK.T | | 491.280 | 3 | 1471.827 | 1471.827 | 0 | −0.1 | 2728 | 598.1 | 598.1 | 598.1 | 9.32 |
| 922 | R.AQDLFLDGVPLRK.T | | 736.417 | 2 | 1471.826 | 1471.827 | 0 | −0.4 | 2728 | 596.9 | 596.9 | 596.9 | 9.32 |
| 922 | R.AQDLFLDGVPLRK.T | | 491.280 | 3 | 1471.827 | 1471.827 | 0 | −0.1 | 2728 | 574.5 | 574.5 | 574.5 | 9.32 |
| 922 | R.AQDLFLDGVPLRK.T | | 736.417 | 2 | 1471.827 | 1471.827 | 0 | −0.1 | 2728 | 540.1 | 540.1 | 540.1 | 8.65 |
| 922 | R.AQDLFLDGVPLRK.T | | 736.417 | 2 | 1471.827 | 1471.827 | 0 | −0.1 | 2728 | 507.0 | 507.0 | 507.0 | 8.52 |
| 922 | R.AQDLFLDGVPLRK.T | | 736.417 | 2 | 1471.827 | 1471.827 | 0 | −0.2 | 2728 | 369.4 | 369.4 | 369.4 | 7.27 |
| 922 | R.AQDLFLDGVPLRK.T | | 491.280 | 3 | 1471.827 | 1471.827 | 0 | −0.1 | 2728 | 332.6 | 332.6 | 332.6 | 5.98 |
| 2639 | K.IPLFLVGKPGSSK.S | | 448.275 | 3 | 1342.809 | 1342.809 | 0 | −0.2 | 2763 | 425.1 | 425.1 | 425.1 | 7.64 |
| 850 | K.TIVADAMQGPAAYSDLFR.S | | 963.475 | 2 | 1925.943 | 1925.943 | 0 | 0.3 | 2780 | 603.7 | 603.7 | 603.7 | 10.79 |
| 850 | K.TIVADAMQGPAAYSDLFR.S | | 963.477 | 2 | 1925.947 | 1925.943 | 0 | 2.3 | 2780 | 611.6 | 611.6 | 611.6 | 9.49 |
| 850 | K.TIVADAMQGPAAYSDLFR.S | | 642.653 | 3 | 1925.943 | 1925.943 | 0 | 0.4 | 2780 | 599.7 | 599.7 | 599.7 | 9.25 |
| 850 | K.TIVADAMQGPAAYSDLFR.S | | 642.653 | 3 | 1925.944 | 1925.943 | 0 | 0.5 | 2780 | 565.4 | 565.4 | 565.4 | 9.25 |
| 850 | K.TIVADAMQGPAAYSDLFR.S | | 642.652 | 3 | 1925.943 | 1925.943 | 0 | 0.1 | 2780 | 537.7 | 537.7 | 537.7 | 8.58 |
| 850 | K.TIVADAMQGPAAYSDLFR.S | | 642.652 | 3 | 1925.943 | 1925.943 | 0 | 0.1 | 2780 | 496.4 | 496.4 | 496.4 | 8.45 |
| 850 | K.TIVADAMQGPAAYSDLFR.S | | 963.473 | 2 | 1925.938 | 1925.943 | 0 | −2.2 | 2780 | 528.4 | 528.4 | 528.4 | 8.20 |
| 850 | K.TIVADAMQGPAAYSDLFR.S | | 642.653 | 3 | 1925.945 | 1925.943 | 0 | 1.0 | 2780 | 494.7 | 494.7 | 494.7 | 7.90 |
| 1545 | K.TIVADAM[+15.995]QGPAAYSDLFR.S | M[+16] | 647.984 | 3 | 1941.938 | 1941.938 | 0 | 0.3 | 2780 | 432.4 | 432.4 | 432.4 | 7.31 |
| 850 | K.TIVADAMQGPAAYSDLFR.S | | 642.654 | 3 | 1925.948 | 1925.943 | 0 | 2.7 | 2780 | 542.6 | 542.6 | 542.6 | 7.28 |
| 850 | K.TIVADAMQGPAAYSDLFR.S | | 642.652 | 3 | 1925.943 | 1925.943 | 0 | 0.1 | 2780 | 386.0 | 386.0 | 386.0 | 7.20 |
| 850 | K.TIVADAMQGPAAYSDLFR.S | | 642.653 | 3 | 1925.944 | 1925.943 | 0 | 0.5 | 2780 | 349.0 | 349.0 | 349.0 | 5.91 |
| 1688 | R.SLKQVHLVSFQC[+57.021]SPHSTPQGIISTFR.Q | C[+57] | 739.388 | 4 | 2954.531 | 2954.531 | 0 | 0.1 | 2798 | 770.2 | 770.2 | 770.2 | 13.53 |
| 1688 | R.SLKQVHLVSFQC[+57.021]SPHSTPQGIISTFR.Q | C[+57] | 591.712 | 5 | 2954.529 | 2954.531 | 0 | −0.7 | 2798 | 306.8 | 273.0 | 273.0 | 4.22 |
| 1416 | R.FQQGKDLQQYVSVVVLDEVGLAEDSPKMPLK.T | | 1154.274 | 3 | 3460.807 | 3460.803 | 0 | 1.2 | 2828 | 833.8 | 833.8 | 833.8 | 13.52 |
| 1416 | R.FQQGKDLQQYVSVVVLDEVGLAEDSPKMPLK.T | | 865.956 | 4 | 3460.804 | 3460.803 | 0 | 0.2 | 2828 | 733.7 | 733.7 | 733.7 | 11.52 |
| 1416 | R.FQQGKDLQQYVSVVVLDEVGLAEDSPKMPLK.T | | 865.956 | 4 | 3460.803 | 3460.803 | 0 | −0.1 | 2828 | 711.5 | 711.5 | 711.5 | 11.52 |
| 1416 | R.FQQGKDLQQYVSVVVLDEVGLAEDSPKMPLK.T | | 1154.274 | 3 | 3460.807 | 3460.803 | 0 | 1.2 | 2828 | 699.9 | 699.9 | 699.9 | 10.52 |
| 1617 | R.FQQGKDLQQYVSVVVLDEVGLAEDSPKM[+15.995]PLK.T | M[+16] | 1159.606 | 3 | 3476.804 | 3476.798 | 0 | 1.5 | 2828 | 629.2 | 626.6 | 626.6 | 8.97 |
| 1416 | R.FQQGKDLQQYVSVVVLDEVGLAEDSPKMPLK.T | | 692.967 | 5 | 3460.805 | 3460.803 | 0 | 0.6 | 2828 | 591.1 | 591.1 | 591.1 | 7.98 |
| 1617 | R.FQQGKDLQQYVSVVVLDEVGLAEDSPKM[+15.995]PLK.T | M[+16] | 696.166 | 5 | 3476.801 | 3476.798 | 0 | 0.7 | 2828 | 597.8 | 597.8 | 597.8 | 7.43 |
| 1416 | R.FQQGKDLQQYVSVVVLDEVGLAEDSPKMPLK.T | | 692.967 | 5 | 3460.804 | 3460.803 | 0 | 0.3 | 2828 | 537.5 | 537.5 | 537.5 | 7.31 |
| 961 | R.FQQGKDLQQYVSVVVLDEVGLAEDSPK.M | | 997.849 | 3 | 2991.533 | 2991.531 | 0 | 0.8 | 2828 | 430.6 | 430.6 | 430.6 | 7.21 |
| 1617 | R.FQQGKDLQQYVSVVVLDEVGLAEDSPKM[+15.995]PLK.T | M[+16] | 869.956 | 4 | 3476.804 | 3476.798 | 0 | 1.6 | 2828 | 485.3 | 485.3 | 485.3 | 6.94 |
| 961 | R.FQQGKDLQQYVSVVVLDEVGLAEDSPK.M | | 748.639 | 4 | 2991.533 | 2991.531 | 0 | 0.5 | 2828 | 368.8 | 368.8 | 368.8 | 6.73 |
| 961 | R.FQQGKDLQQYVSVVVLDEVGLAEDSPK.M | | 997.851 | 3 | 2991.538 | 2991.531 | 0 | 2.4 | 2828 | 448.0 | 448.0 | 448.0 | 6.45 |
| 961 | R.FQQGKDLQQYVSVVVLDEVGLAEDSPK.M | | 997.850 | 3 | 2991.536 | 2991.531 | 0 | 1.7 | 2828 | 347.4 | 347.4 | 347.4 | 5.81 |
| 961 | R.FQQGKDLQQYVSVVVLDEVGLAEDSPK.M | | 748.639 | 4 | 2991.533 | 2991.531 | 0 | 0.7 | 2828 | 312.7 | 312.7 | 312.7 | 5.17 |
| 1416 | R.FQQGKDLQQYVSVVVLDEVGLAEDSPKMPLK.T | | 577.640 | 6 | 3460.802 | 3460.803 | 0 | −0.4 | 2828 | 386.5 | 386.5 | 386.5 | 4.80 |
| 1416 | R.FQQGKDLQQYVSVVVLDEVGLAEDSPKMPLK.T | | 865.957 | 4 | 3460.806 | 3460.803 | 0 | 0.7 | 2828 | 353.2 | 205.3 | 205.3 | 4.26 |
| 1171 | K.DLQQYVSVVVLDEVGLAEDSPKMPLK.T | | 718.881 | 4 | 2872.504 | 2872.501 | 0 | 0.8 | 2833 | 818.1 | 818.1 | 818.1 | 13.99 |
| 1171 | K.DLQQYVSVVVLDEVGLAEDSPKMPLK.T | | 718.882 | 4 | 2872.505 | 2872.501 | 0 | 1.2 | 2833 | 713.9 | 713.9 | 713.9 | 11.99 |
| 1171 | K.DLQQYVSVVVLDEVGLAEDSPKMPLK.T | | 958.174 | 3 | 2872.507 | 2872.501 | 0 | 1.9 | 2833 | 737.2 | 737.2 | 737.2 | 11.23 |
| 932 | K.DLQQYVSVVVLDEVGLAEDSPK.M | | 1202.119 | 2 | 2403.231 | 2403.229 | 0 | 0.7 | 2833 | 620.5 | 576.6 | 576.6 | 10.79 |
| 1171 | K.DLQQYVSVVVLDEVGLAEDSPKMPLK.T | | 958.173 | 3 | 2872.505 | 2872.501 | 0 | 1.2 | 2833 | 607.3 | 553.3 | 553.3 | 10.53 |
| 1171 | K.DLQQYVSVVVLDEVGLAEDSPKMPLK.T | | 718.881 | 4 | 2872.504 | 2872.501 | 0 | 0.9 | 2833 | 614.3 | 591.5 | 591.5 | 9.99 |
| 932 | K.DLQQYVSVVVLDEVGLAEDSPK.M | | 1202.118 | 2 | 2403.229 | 2403.229 | 0 | 0.2 | 2833 | 456.6 | 456.6 | 456.6 | 8.78 |
| 932 | K.DLQQYVSVVVLDEVGLAEDSPK.M | | 801.748 | 3 | 2403.231 | 2403.229 | 0 | 0.7 | 2833 | 544.5 | 544.5 | 544.5 | 8.58 |
| 1546 | K.DLQQYVSVVVLDEVGLAEDSPKM[+15.995]PLK.T | M[+16] | 722.880 | 4 | 2888.497 | 2888.496 | 0 | 0.3 | 2833 | 550.8 | 550.8 | 550.8 | 8.32 |
| 1171 | K.DLQQYVSVVVLDEVGLAEDSPKMPLK.T | | 1436.758 | 2 | 2872.509 | 2872.501 | 0 | 2.8 | 2833 | 599.0 | 599.0 | 599.0 | 8.23 |
| 932 | K.DLQQYVSVVVLDEVGLAEDSPK.M | | 801.748 | 3 | 2403.230 | 2403.229 | 0 | 0.6 | 2833 | 413.0 | 413.0 | 413.0 | 7.53 |
| 932 | K.DLQQYVSVVVLDEVGLAEDSPK.M | | 801.748 | 3 | 2403.229 | 2403.229 | 0 | 0.1 | 2833 | 381.4 | 288.3 | 288.3 | 5.45 |
| 932 | K.DLQQYVSVVVLDEVGLAEDSPK.M | | 802.084 | 3 | 2404.237 | 2403.229 | 1 | 2.1 | 2833 | 326.6 | 309.1 | 309.1 | 4.05 |
| 1686 | K.MPLKTLHPLLEDGC[+57.021]IEDDPAPHKK.V | C[+57] | 689.354 | 4 | 2754.393 | 2754.395 | 0 | −0.8 | 2855 | 666.9 | 666.9 | 666.9 | 8.93 |
| 1686 | K.MPLKTLHPLLEDGC[+57.021]IEDDPAPHKK.V | C[+57] | 551.685 | 5 | 2754.396 | 2754.395 | 0 | 0.2 | 2855 | 550.5 | 550.5 | 550.5 | 8.52 |
| 1686 | K.MPLKTLHPLLEDGC[+57.021]IEDDPAPHKK.V | CI+57 | 459.905 | 6 | 2754.395 | 2754.395 | 0 | 0.1 | 2855 | 321.4 | 321.4 | 321.4 | 5.65 |
| 1723 | K.TLHPLLEDGC[+57.021]IEDDPAPHKK.V | C[+57] | 572.036 | 4 | 2285.122 | 2285.123 | 0 | −0.3 | 2859 | 790.1 | 790.1 | 790.1 | 13.53 |
| 1723 | K.TLHPLLEDGC[+57.021]IEDDPAPHKK.V | C[+57] | 572.036 | 4 | 2285.122 | 2285.123 | 0 | −0.3 | 2859 | 735.7 | 735.7 | 735.7 | 12.53 |
| 1723 | K.TLHPLLEDGC[+57.021]IEDDPAPHKK.V | C[+57] | 572.036 | 4 | 2285.123 | 2285.123 | 0 | 0.1 | 2859 | 725.9 | 725.9 | 725.9 | 12.53 |
| 1723 | K.TLHPLLEDGC[+57.021]IEDDPAPHKK.V | C[+57] | 762.379 | 3 | 2285.123 | 2285.123 | 0 | 0.0 | 2859 | 798.9 | 798.9 | 798.9 | 12.19 |
| 1723 | K.TLHPLLEDGC[+57.021]IEDDPAPHKK.V | C[+57] | 762.378 | 3 | 2285.121 | 2285.123 | 0 | −1.1 | 2859 | 761.6 | 761.6 | 761.6 | 11.27 |
| 1723 | K.TLHPLLEDGC[+57.021]IEDDPAPHKK.V | C[+57] | 457.831 | 5 | 2285.124 | 2285.123 | 0 | 0.2 | 2859 | 595.7 | 595.7 | 595.7 | 9.53 |
| 1723 | K.TLHPLLEDGC[+57.021]IEDDPAPHKK.V | C[+57 | 572.287 | 4 | 2286.126 | 2285.123 | 1 | −0.3 | 2859 | 581.2 | 581.2 | 581.2 | 9.53 |
| 1723 | K.TLHPLLEDGC[+57.021]IEDDPAPHKK.V | C[+57 | 457.830 | 5 | 2285.123 | 2285.123 | 0 | −0.1 | 2859 | 537.1 | 537.1 | 537.1 | 8.86 |
| 4119 | K.KVGFVGISNWALDPAKMNR.G | | 526.785 | 4 | 2104.120 | 2103.117 | 1 | −0.3 | 2878 | 478.7 | 478.7 | 68.5 | 7.97 |
| 1966 | K.KVGFVGISNWALDPAK.M | | 567.982 | 3 | 1701.933 | 1701.932 | 0 | 0.3 | 2878 | 409.3 | 385.6 | 385.6 | 7.64 |
| 1006 | K.VGFVGISNWALDPAKMNR.G | | 659.347 | 3 | 1976.025 | 1975.022 | 1 | −0.1 | 2879 | 670.7 | 670.7 | 259.6 | 11.53 |
| 1006 | K.VGFVGISNWALDPAKMNR.G | | 659.013 | 3 | 1975.024 | 1975.022 | 0 | 0.9 | 2879 | 660.1 | 660.1 | 660.1 | 11.53 |
| 1006 | K.VGFVGISNWALDPAKMNR.G | | 659.013 | 3 | 1975.024 | 1975.022 | 0 | 1.1 | 2879 | 651.5 | 651.5 | 651.5 | 11.53 |
| 836 | K.VGFVGISNWALDPAK.M | | 787.422 | 2 | 1573.837 | 1573.837 | 0 | −0.3 | 2879 | 646.4 | 646.4 | 646.4 | 10.58 |
| 1006 | K.VGFVGISNWALDPAKMNR.G | | 659.013 | 3 | 1975.023 | 1975.022 | 0 | 0.6 | 2879 | 604.9 | 604.9 | 604.9 | 10.53 |
| 1006 | K.VGFVGISNWALDPAKMNR.G | | 659.012 | 3 | 1975.023 | 1975.022 | 0 | 0.4 | 2879 | 602.2 | 602.2 | 602.2 | 10.53 |
| 1006 | K.VGFVGISNWALDPAKMNR.G | | 659.012 | 3 | 1975.023 | 1975.022 | 0 | 0.4 | 2879 | 1585.6 | 576.5 | 576.5 | 9.53 |
| 1530 | K.VGFVGISNWALDPAKM[+15.995]NR.G | M[+16] | 664.344 | 3 | 1991.018 | 1991.017 | 0 | 0.5 | 2879 | 1559.4 | 559.4 | 559.4 | 8.86 |
| 1006 | K.VGFVGISNWALDPAKMNR.G | | 659.013 | 3 | 1975.024 | 1975.022 | 0 | 1.0 | 2879 | 555.9 | 555.9 | 555.9 | 8.86 |
| 1530 | K.VGFVGISNWALDPAKM[+15.995]NR.G | M[+16] | 996.012 | 2 | 1991.017 | 1991.017 | 0 | −0.1 | 2879 | 530.4 | 530.4 | 530.4 | 8.86 |
| 836 | K.VGFVGISNWALDPAK.M | | 787.422 | 2 | 1573.837 | 1573.837 | 0 | −0.1 | 2879 | 464.7 | 464.7 | 464.7 | 8.57 |
| 836 | K.VGFVGISNWALDPAK.M | | 787.422 | 2 | 1573.837 | 1573.837 | 0 | −0.2 | 2879 | 428.2 | 428.2 | 428.2 | 8.41 |
| 836 | K.VGFVGISNWALDPAK.M | | 787.422 | 2 | 1573.837 | 1573.837 | 0 | −0.1 | 2879 | 469.4 | 469.4 | 469.4 | 8.02 |
| 836 | K.VGFVGISNWALDPAK.M | | 525.284 | 3 | 1573.837 | 1573.837 | 0 | 0.0 | 2879 | 452.8 | 452.8 | 452.8 | 7.26 |
| 1006 | K.VGFVGISNWALDPAKMNR.G | | 659.013 | 3 | 1975.024 | 1975.022 | 0 | 1.3 | 2879 | 347.0 | 347.0 | 347.0 | 6.19 |
| 1737 | R.GSPNETELIESAKGIC[+57.021]SSDILVQDR.V | C[+57] | 906.780 | 3 | 2718.326 | 2718.325 | 0 | 0.5 | 2903 | 725.0 | 725.0 | 725.0 | 12.53 |
| 990 | R.GSPNETELIESAK.G | | 687.841 | 2 | 1374.675 | 1374.675 | 0 | 0.1 | 2903 | 663.2 | 663.2 | 663.2 | 11.58 |
| 990 | R.GSPNETELIESAK.G | | 687.841 | 2 | 1374.675 | 1374.675 | 0 | −0.1 | 2903 | 601.7 | 601.7 | 601.7 | 10.58 |
| 990 | R.GSPNETELIESAK.G | | 458.896 | 3 | 1374.675 | 1374.675 | 0 | −0.1 | 2903 | 506.5 | 506.5 | 506.5 | 8.24 |
| 990 | R.GSPNETELIESAK.G | | 458.897 | 3 | 1374.675 | 1374.675 | 0 | 0.1 | 2903 | 466.2 | 465.9 | 465.9 | 7.26 |
| 1479 | R.GSPN[+0.984]ETELIESAK.G | N[+1] | 688.333 | 2 | 1375.660 | 1375.659 | 0 | 0.5 | 2903 | 366.5 | 366.5 | 366.5 | 6.87 |
| 3340 | K.GIC[+57.021]SSDILVQDR.V | C[+57] | 681.838 | 2 | 1362.668 | 1362.668 | 0 | −0.2 | 2916 | 439.6 | 439.6 | 439.6 | 7.86 |
| 1862 | R.VQGYFASFAK.A | | 559.288 | 2 | 1117.568 | 1117.568 | 0 | 0.0 | 2928 | 468.7 | 468.7 | 468.7 | 7.80 |
| 877 | K.RQDKEFFGLR.D | | 432.567 | 3 | 1295.685 | 1295.686 | 0 | −0.1 | 2945 | 397.9 | 397.9 | 397.9 | 7.06 |
| 877 | K.RQDKEFFGLR.D | | 432.567 | 3 | 1295.685 | 1295.686 | 0 | −0.4 | 2945 | 345.4 | 345.4 | 345.4 | 4.40 |
| 2123 | R.QDKEFFGLRDYYSLIK.M | | 506.264 | 4 | 2022.034 | 2022.033 | 0 | 0.3 | 2946 | 399.5 | 399.5 | 399.5 | 7.15 |
| 2041 | R.DYYSLIK.M | | 451.237 | 2 | 901.467 | 901.467 | 0 | 0.0 | 2955 | 358.5 | 358.5 | 358.5 | 5.58 |
| 1007 | K.ASNRKPSPQDIAQAVLR.N | | 617.678 | 3 | 1851.020 | 1851.020 | 0 | 0.5 | 2969 | 659.7 | 659.7 | 659.7 | 11.53 |
| 1007 | K.ASNRKPSPQDIAQAVLR.N | | 617.678 | 3 | 1851.021 | 1851.020 | 0 | 0.6 | 2969 | 561.3 | 561.3 | 561.3 | 9.53 |
| 1007 | K.ASNRKPSPQDIAQAVLR.N | | 617.678 | 3 | 1851.020 | 1851.020 | 0 | 0.3 | 2969 | 402.4 | 402.4 | 402.4 | 7.59 |
| 1007 | K.ASNRKPSPQDIAQAVLR.N | | 617.678 | 3 | 1851.020 | 1851.020 | 0 | 0.4 | 2969 | 345.1 | 345.1 | 345.1 | 6.19 |
| 839 | R.KPSPQDIAQAVLR.N | | 474.940 | 3 | 1422.806 | 1422.806 | 0 | 0.0 | 2973 | 390.0 | 390.0 | 390.0 | 7.75 |
| 839 | R.KPSPQDIAQAVLR.N | | 711.907 | 2 | 1422.807 | 1422.806 | 0 | 0.5 | 2973 | 380.5 | 380.5 | 380.5 | 7.75 |
| 839 | R.KPSPQDIAQAVLR.N | | 474.940 | 3 | 1422.806 | 1422.806 | 0 | −0.2 | 2973 | 436.4 | 436.4 | 436.4 | 7.64 |
| 839 | R.KPSPQDIAQAVLR.N | | 474.940 | 3 | 1422.807 | 1422.806 | 0 | 0.1 | 2973 | 376.1 | 376.1 | 376.1 | 7.32 |
| 839 | R.KPSPQDIAQAVLR.N | | 474.940 | 3 | 1422.806 | 1422.806 | 0 | 0.0 | 2973 | 371.5 | 371.5 | 371.5 | 7.32 |
| 839 | R.KPSPQDIAQAVLR.N | | 474.940 | 3 | 1422.806 | 1422.806 | 0 | 0.0 | 2973 | 362.5 | 362.5 | 362.5 | 7.14 |
| 839 | R.KPSPQDIAQAVLR.N | | 474.940 | 3 | 1422.807 | 1422.806 | 0 | 0.1 | 2973 | 337.0 | 337.0 | 337.0 | 6.04 |
| 815 | R.NFSGKDDIQALDIFLANLPEAK.C | | 1210.129 | 2 | 2419.251 | 2419.250 | 0 | 0.2 | 2986 | 476.5 | 438.8 | 438.8 | 8.52 |
| 815 | R.NFSGKDDIQALDIFLANLPEAK.C | | 807.089 | 3 | 2419.252 | 2419.250 | 0 | 0.5 | 2986 | 453.1 | 453.1 | 453.1 | 8.52 |
| 815 | R.NFSGKDDIQALDIFLANLPEAK.C | | 1210.129 | 2 | 2419.250 | 2419.250 | 0 | −0.1 | 2986 | 427.9 | 427.9 | 427.9 | 8.36 |
| 815 | R.NFSGKDDIQALDIFLANLPEAK.C | | 807.089 | 3 | 2419.254 | 2419.250 | 0 | 1.3 | 2986 | 489.1 | 489.1 | 489.1 | 8.18 |
| 815 | R.NFSGKDDIQALDIFLANLPEAK.C | | 807.088 | 3 | 2419.251 | 2419.250 | 0 | 0.1 | 2986 | 420.0 | 420.0 | 420.0 | 7.81 |
| 815 | R.NFSGKDDIQALDIFLANLPEAK.C | | 807.089 | 3 | 2419.252 | 2419.250 | 0 | 0.5 | 2986 | 418.0 | 418.0 | 418.0 | 7.59 |
| 815 | R.NFSGKDDIQALDIFLANLPEAK.C | | 807.089 | 3 | 2419.253 | 2419.250 | 0 | 1.2 | 2986 | 414.3 | 414.3 | 414.3 | 7.21 |
| 815 | R.NFSGKDDIQALDIFLANLPEAK.C | | 807.088 | 3 | 2419.251 | 2419.250 | 0 | 0.1 | 2986 | 342.5 | 342.5 | 342.5 | 5.99 |
| 815 | R.NFSGKDDIQALDIFLANLPEAK.C | | 807.089 | 3 | 2419.254 | 2419.250 | 0 | 1.3 | 2986 | 331.1 | 331.1 | 331.1 | 5.81 |
| 1490 | R.N[+0.984]FSGKDDIQALDIFLANLPEAK.C | N[+1] | 807.417 | 3 | 2420.235 | 2420.234 | 0 | 0.2 | 2986 | 325.5 | 325.5 | 219.2 | 5.81 |
| 815 | R.NFSGKDDIQALDIFLANLPEAK.C | | 605.568 | 4 | 2419.250 | 2419.250 | 0 | −0.4 | 2986 | 316.0 | 316.0 | 316.0 | 5.60 |
| 815 | R.NFSGKDDIQALDIFLANLPEAK.C | | 605.568 | 4 | 2419.251 | 2419.250 | 0 | 0.2 | 2986 | 320.6 | 320.6 | 320.6 | 5.27 |
| 815 | R.NFSGKDDIQALDIFLANLPEAK.C | | 605.568 | 4 | 2419.248 | 2419.250 | 0 | −0.9 | 2986 | 308.6 | 308.6 | 308.6 | 4.46 |
| 876 | K.DDIQALDIFLANLPEAK.C | | 629.335 | 3 | 1885.991 | 1885.991 | 0 | 0.2 | 2991 | 463.2 | 463.2 | 463.2 | 7.69 |
| 1717 | K.C[+57.021]SEEVSPMQLIK.Q | C[+57] | 710.844 | 2 | 1420.681 | 1420.681 | 0 | −0.2 | 3008 | 525.8 | 525.8 | 525.8 | 8.91 |
| 1671 | K.C[+57.021]SEEVSPM[+15.995]QLIK.Q | C[+57], | 718.842 | 2 | 1436.676 | 1436.676 | 0 | 0.2 | 3008 | 521.4 | 311.9 | 311.9 | 7.00 |
| | | M[+16] | | | | | | | | | | | |
| 1671 | K.C[+57.021]SEEVSPM[+15.995]QLIK.Q | C[+57], | 718.842 | 2 | 1436.676 | 1436.676 | 0 | 0.0 | 3008 | 458.2 | 257.0 | 257.0 | 6.33 |
| | | M[+16] | | | | | | | | | | | |
| 1166 | K.QNIFGPSQKVPGGEQEDAESR.Y | | 758.364 | 3 | 2273.079 | 2273.079 | 0 | −0.3 | 3020 | 853.0 | 853.0 | 853.0 | 15.48 |
| 1166 | K.QNIFGPSQKVPGGEQEDAESR.Y | | 758.365 | 3 | 2273.079 | 2273.079 | 0 | 0.1 | 3020 | 837.3 | 837.3 | 837.3 | 14.54 |
| 1166 | K.QNIFGPSQKVPGGEQEDAESR.Y | | 758.364 | 3 | 2273.078 | 2273.079 | 0 | −0.4 | 3020 | 701.3 | 701.3 | 701.3 | 11.61 |
| 940 | K.QNIFGPSQKVPGGEQEDAESRYLLVLTK.N | | 776.657 | 4 | 3103.606 | 3103.606 | 0 | 0.2 | 3020 | 616.0 | 616.0 | 616.0 | 10.19 |
| 940 | K.QNIFGPSQKVPGGEQEDAESRYLLVLTK.N | | 1035.207 | 3 | 3103.606 | 3103.606 | 0 | −0.1 | 3020 | 570.2 | 570.2 | 570.2 | 9.19 |
| 940 | K.QNIFGPSQKVPGGEQEDAESRYLLVLTK.N | | 776.657 | 4 | 3103.606 | 3103.606 | 0 | 0.0 | 3020 | 485.5 | 485.5 | 485.5 | 8.39 |
| 1950 | R.YLLVLTK.N | | 425.276 | 2 | 849.545 | 849.544 | 0 | 0.1 | 3041 | 364.3 | 364.3 | 364.3 | 6.87 |
| 1950 | R.YLLVLTK.N | | 425.276 | 2 | 849.545 | 849.544 | 0 | 0.1 | 3041 | 335.4 | 335.4 | 335.4 | 5.86 |
| 1732 | K.NYVALQILQQTFFEGDQQPEIIFGSGFPKDQEYTQLC. | C[+57] | 1127.804 | 4 | 4508.195 | 4508.187 | 0 | 1.9 | 3048 | 961.0 | 961.0 | 961.0 | 15.00 |
| | [+57.021]RN | | | | | | | | | | | | |
| 1732 | K.NYVALQILQQTFFEGDQQPEIIFGSGFPKDQEYTQLC. | C[+57] | 902.444 | 5 | 4508.193 | 4508.187 | 0 | 1.4 | 3048 | 767.2 | 767.2 | 767.2 | 12.32 |
| | [+57.021]RN | | | | | | | | | | | | |
| 957 | K.NYVALQILQQTFFEGDQQPEIIFGSGFPK.D | | 829.424 | 4 | 3314.675 | 3314.673 | 0 | 0.6 | 3048 | 664.5 | 664.5 | 664.5 | 10.58 |
| 957 | K.NYVALQILQQTFFEGDQQPEIIFGSGFPK.D | | 829.425 | 4 | 3314.678 | 3314.673 | 0 | 1.4 | 3048 | 632.3 | 632.3 | 632.3 | 9.58 |
| 957 | K.NYVALQILQQTFFEGDQQPEIIFGSGFPK.D | | 1105.565 | 3 | 3314.679 | 3314.673 | 0 | 1.7 | 3048 | 665.8 | 665.8 | 665.8 | 9.28 |
| 957 | K.NYVALQILQQTFFEGDQQPEIIFGSGFPK.D | | 1105.564 | 3 | 3314.677 | 3314.673 | 0 | 1.2 | 3048 | 397.7 | 397.7 | 397.7 | 5.86 |
| 1693 | K.DQEYTQLC[+57.021]R.N | C[+57] | 606.770 | 2 | 1212.532 | 1212.531 | 0 | 0.3 | 3077 | 480.3 | 480.3 | 480.3 | 7.80 |
| 1693 | K.DQEYTQLC[+57.021]R.N | C[+57] | 606.769 | 2 | 1212.531 | 1212.531 | 0 | −0.1 | 3077 | 426.0 | 426.0 | 426.0 | 7.44 |
| 1093 | K.YVDLGLGTHR.V | | 565.801 | 2 | 1130.595 | 1130.595 | 0 | −0.6 | 3128 | 559.9 | 559.9 | 559.9 | 7.45 |
| 1806 | R.LIVIEEK.D | | 422.263 | 2 | 843.519 | 843.519 | 0 | 0.0 | 3148 | 372.0 | 372.0 | 372.0 | 7.14 |
| 1806 | R.LIVIEEK.D | | 422.263 | 2 | 843.519 | 843.519 | 0 | 0.0 | 3148 | 351.2 | 351.2 | 351.2 | 5.86 |
| 4389 | K.HYLDINTVLEKWQK.S | | 596.321 | 3 | 1786.949 | 1786.949 | 0 | 0.1 | 3172 | 633.6 | 562.8 | 562.8 | 10.32 |
| 2000 | K.HYLDINTVLEK.W | | 448.910 | 3 | 1344.715 | 1344.716 | 0 | −0.3 | 3172 | 309.9 | 309.9 | 309.9 | 5.58 |
| 872 | R.ALTEELHQKVSEEAK.S | | 856.446 | 2 | 1711.884 | 1711.886 | 0 | −1.2 | 3241 | 800.2 | 800.2 | 800.2 | 12.06 |
| 872 | R.ALTEELHQKVSEEAK.S | | 571.300 | 3 | 1711.886 | 1711.886 | 0 | −0.2 | 3241 | 591.4 | 586.3 | 586.3 | 9.32 |
| 872 | R.ALTEELHQKVSEEAK.S | | 571.300 | 3 | 1711.886 | 1711.886 | 0 | −0.1 | 3241 | 580.9 | 580.9 | 580.9 | 9.32 |
| 872 | R.ALTEELHQKVSEEAK.S | | 428.727 | 4 | 1711.886 | 1711.886 | 0 | 0.0 | 3241 | 570.0 | 570.0 | 570.0 | 9.32 |
| 872 | R.ALTEELHQKVSEEAK.S | | 428.727 | 4 | 1711.886 | 1711.886 | 0 | −0.2 | 3241 | 512.1 | 484.1 | 484.1 | 8.52 |
| 872 | R.ALTEELHQKVSEEAK.S | | 571.300 | 3 | 1711.886 | 1711.886 | 0 | 0.0 | 3241 | 479.1 | 479.1 | 479.1 | 8.31 |
| 872 | R.ALTEELHQKVSEEAK.S | | 571.300 | 3 | 1711.885 | 1711.886 | 0 | −0.6 | 3241 | 531.9 | 531.9 | 531.9 | 7.73 |
| 872 | R.ALTEELHQKVSEEAK.S | | 856.447 | 2 | 1711.887 | 1711.886 | 0 | 0.3 | 3241 | 529.3 | 529.3 | 529.3 | 7.31 |
| 872 | R.ALTEELHQKVSEEAK.S | | 856.948 | 2 | 1712.889 | 1711.886 | 1 | −0.5 | 3241 | 561.2 | 561.2 | 561.2 | 7.06 |
| 872 | R.ALTEELHQKVSEEAK.S | | 571.300 | 3 | 1711.886 | 1711.886 | 0 | 0.0 | 3241 | 413.1 | 352.6 | 352.6 | 6.97 |
| 872 | R.ALTEELHQKVSEEAK.S | | 428.727 | 4 | 1711.886 | 1711.886 | 0 | 0.0 | 3241 | 425.5 | 341.4 | 341.4 | 6.20 |
| 872 | R.ALTEELHQKVSEEAK.S | | 856.446 | 2 | 1711.885 | 1711.886 | 0 | −0.6 | 3241 | 384.5 | 384.5 | 384.5 | 5.77 |
| 872 | R.ALTEELHQKVSEEAK.S | | 428.727 | 4 | 1711.887 | 1711.886 | 0 | 0.5 | 3241 | 302.9 | 302.9 | 302.9 | 5.50 |
| 872 | R.ALTEELHQKVSEEAK.S | | 428.727 | 4 | 1711.887 | 1711.886 | 0 | 0.4 | 3241 | 308.0 | 308.0 | 308.0 | 5.32 |
| 1695 | K.SILLNC[+57.021]ATPDAVVR.L | C[+57] | 764.912 | 2 | 1528.816 | 1528.815 | 0 | 0.7 | 3256 | 627.1 | 528.7 | 528.7 | 10.58 |
| 1695 | K.SILLNC[+57.021]ATPDAVVR.L | C[+57] | 510.277 | 3 | 1528.816 | 1528.815 | 0 | 0.4 | 3256 | 432.3 | 338.8 | 338.8 | 5.92 |
| 1173 | R.LSAYSLGGFAAEWLSQEYFHR.Q | | 811.395 | 3 | 2432.171 | 2432.167 | 0 | 1.5 | 3270 | 784.7 | 784.7 | 784.7 | 13.79 |
| 1173 | R.LSAYSLGGFAAEWLSQEYFHR.Q | | 608.798 | 4 | 2432.169 | 2432.167 | 0 | 0.7 | 3270 | 763.1 | 763.1 | 763.1 | 13.25 |
| 1173 | R.LSAYSLGGFAAEWLSQEYFHR.Q | | 1216.589 | 2 | 2432.171 | 2432.167 | 0 | 1.6 | 3270 | 550.5 | 550.5 | 550.5 | 9.12 |
| 1173 | R.LSAYSLGGFAAEWLSQEYFHR.Q | | 811.394 | 3 | 2432.166 | 2432.167 | 0 | −0.2 | 3270 | 407.7 | 407.7 | 407.7 | 7.85 |
| 1005 | R.QRHNSFADFLQAHLHTADLER.H | | 627.314 | 4 | 2506.234 | 2506.233 | 0 | 0.4 | 3291 | 682.8 | 682.8 | 682.8 | 10.19 |
| 1005 | R.QRHNSFADFLQAHLHTADLER.H | | 836.082 | 3 | 2506.233 | 2506.233 | 0 | −0.4 | 3291 | 662.2 | 662.2 | 662.2 | 10.19 |
| 1005 | R.QRHNSFADFLQAHLHTADLER.H | | 502.053 | 5 | 2506.234 | 2506.233 | 0 | 0.3 | 3291 | 503.2 | 503.2 | 503.2 | 8.72 |
| 1005 | R.QRHNSFADFLQAHLHTADLER.H | | 502.053 | 5 | 2506.234 | 2506.233 | 0 | 0.3 | 3291 | 431.0 | 431.0 | 431.0 | 7.81 |
| 1005 | R.QRHNSFADFLQAHLHTADLER.H | | 418.879 | 6 | 2508.240 | 2506.233 | 2 | 0.0 | 3291 | 429.3 | 429.3 | 75.9 | 6.58 |
| 1005 | R.QRHNSFADFLQAHLHTADLER.H | | 627.314 | 4 | 2506.233 | 2506.233 | 0 | −0.2 | 3291 | 381.5 | 381.2 | 381.2 | 5.93 |
| 854 | R.HNSFADFLQAHLHTADLER.H | | 556.274 | 4 | 2222.073 | 2222.074 | 0 | −0.3 | 3293 | 695.4 | 695.4 | 695.4 | 11.79 |
| 854 | R.HNSFADFLQAHLHTADLER.H | | 556.274 | 4 | 2222.073 | 2222.074 | 0 | −0.2 | 3293 | 660.3 | 660.3 | 660.3 | 11.79 |
| 854 | R.HNSFADFLQAHLHTADLER.H | | 556.274 | 4 | 2222.074 | 2222.074 | 0 | −0.1 | 3293 | 635.2 | 635.2 | 635.2 | 10.79 |
| 854 | R.HNSFADFLQAHLHTADLER.H | | 556.274 | 4 | 2222.074 | 2222.074 | 0 | 0.2 | 3293 | 620.0 | 620.0 | 620.0 | 10.79 |
| 854 | R.HNSFADFLQAHLHTADLER.H | | 445.221 | 5 | 2222.074 | 2222.074 | 0 | 0.1 | 3293 | 575.3 | 575.3 | 575.3 | 9.79 |
| 854 | R.HNSFADFLQAHLHTADLER.H | | 445.221 | 5 | 2222.074 | 2222.074 | 0 | 0.2 | 3293 | 429.5 | 429.5 | 429.5 | 8.62 |
| 854 | R.HNSFADFLQAHLHTADLER.H | | 741.360 | 3 | 2222.067 | 2222.074 | 0 | −3.1 | 3293 | 478.3 | 478.3 | 478.3 | 5.37 |
| 943 | R.HAIFTEITTFSR.L | | 711.873 | 2 | 1422.738 | 1422.738 | 0 | 0.1 | 3312 | 523.2 | 523.2 | 523.2 | 8.91 |
| 943 | R.HAIFTEITTFSR.L | | 711.873 | 2 | 1422.739 | 1422.738 | 0 | 0.6 | 3312 | 508.2 | 508.2 | 508.2 | 8.78 |
| 943 | R.HAIFTEITTFSR.L | | 711.873 | 2 | 1422.738 | 1422.738 | 0 | 0.3 | 3312 | 483.1 | 483.1 | 483.1 | 8.78 |
| 943 | R.HAIFTEITTFSR.L | | 711.873 | 2 | 1422.738 | 1422.738 | 0 | 0.1 | 3312 | 396.2 | 396.2 | 396.2 | 8.30 |
| 943 | R.HAIFTEITTFSR.L | | 474.917 | 3 | 1422.737 | 1422.738 | 0 | −0.2 | 3312 | 384.9 | 384.9 | 384.9 | 7.75 |
| 943 | R.HAIFTEITTFSR.L | | 474.917 | 3 | 1422.738 | 1422.738 | 0 | 0.0 | 3312 | 393.4 | 393.4 | 393.4 | 7.53 |
| 943 | R.HAIFTEITTFSR.L | | 474.917 | 3 | 1422.738 | 1422.738 | 0 | 0.0 | 3312 | 384.6 | 384.6 | 384.6 | 7.32 |
| 943 | R.HAIFTEITTFSR.L | | 474.917 | 3 | 1422.737 | 1422.738 | 0 | −0.7 | 3312 | 421.4 | 421.4 | 421.4 | 6.94 |
| 1143 | R.APKPTLLWLQQFDTEYSFLKEVR.N | | 937.169 | 3 | 2809.492 | 2809.492 | 0 | −0.1 | 3341 | 851.7 | 851.7 | 851.7 | 15.48 |
| 1143 | R.APKPTLLWLQQFDTEYSFLKEVR.N | | 703.129 | 4 | 2809.493 | 2809.492 | 0 | 0.4 | 3341 | 611.1 | 611.1 | 611.1 | 10.53 |
| 1143 | R.APKPTLLWLQQFDTEYSFLKEVR.N | | 562.905 | 5 | 2810.497 | 2809.492 | 1 | 0.3 | 3341 | 585.3 | 585.3 | 585.3 | 8.99 |
| 1143 | R.APKPTLLWLQQFDTEYSFLKEVR.N | | 703.128 | 4 | 2809.491 | 2809.492 | 0 | −0.5 | 3341 | 586.0 | 586.0 | 586.0 | 8.61 |
| 894 | R.APKPTLLWLQQFDTEYSFLK.E | | 809.099 | 3 | 2425.283 | 2425.280 | 0 | 1.2 | 3341 | 516.5 | 516.5 | 516.5 | 8.01 |
| 894 | R.APKPTLLWLQQFDTEYSFLK.E | | 607.076 | 4 | 2425.282 | 2425.280 | 0 | 0.6 | 3341 | 425.6 | 425.6 | 425.6 | 7.31 |
| 1143 | R.APKPTLLWLQQFDTEYSFLKEVR.N | | 703.129 | 4 | 2809.492 | 2809.492 | 0 | −0.1 | 3341 | 340.1 | 340.1 | 340.1 | 5.99 |
| 2170 | K.ILIFQTDFEDGIR.S | | 783.912 | 2 | 1566.816 | 1566.816 | 0 | −0.1 | 3374 | 483.8 | 483.8 | 483.8 | 8.78 |
| 858 | K.ILIFQTDFEDGIRSAQLIASAK.Y | | 812.777 | 3 | 2436.315 | 2436.313 | 0 | 0.7 | 3374 | 519.9 | 519.9 | 519.9 | 8.72 |
| 2170 | K.ILIFQTDFEDGIR.S | | 783.912 | 2 | 1566.817 | 1566.816 | 0 | 0.5 | 3374 | 462.8 | 462.8 | 462.8 | 8.57 |
| 858 | K.ILIFQTDFEDGIRSAQLIASAK.Y | | 609.834 | 4 | 2436.315 | 2436.313 | 0 | 0.9 | 3374 | 505.7 | 505.7 | 505.7 | 8.19 |
| 2170 | K.ILIFQTDFEDGIR.S | | 783.912 | 2 | 1566.817 | 1566.816 | 0 | 0.5 | 3374 | 367.8 | 367.8 | 367.8 | 7.32 |
| 2170 | K.ILIFQTDFEDGIR.S | | 522.943 | 3 | 1566.815 | 1566.816 | 0 | −0.7 | 3374 | 390.1 | 390.1 | 390.1 | 6.07 |
| 3530 | R.SAQLIASAK.Y | | 444.761 | 2 | 888.515 | 888.515 | 0 | 0.0 | 3387 | 370.0 | 370.0 | 370.0 | 7.32 |
| 3530 | R.SAQLIASAK.Y | | 444.761 | 2 | 888.515 | 888.515 | 0 | 0.2 | 3387 | 339.8 | 339.8 | 339.8 | 6.04 |
| 848 | K.YSVINEINK.I | | 540.290 | 2 | 1079.573 | 1079.573 | 0 | 0.0 | 3396 | 525.5 | 525.5 | 525.5 | 8.14 |
| 848 | K.YSVINEINK.I | | 540.290 | 2 | 1079.573 | 1079.573 | 0 | 0.0 | 3396 | 307.7 | 307.7 | 307.7 | 5.76 |
| 855 | R.RSTLMVSDVTR.L | | 422.227 | 3 | 1264.668 | 1264.668 | 0 | −0.2 | 3447 | 482.6 | 429.6 | 429.6 | 8.01 |
| 855 | R.RSTLMVSDVTR.L | | 422.228 | 3 | 1264.668 | 1264.668 | 0 | 0.1 | 3447 | 406.7 | 406.7 | 406.7 | 7.26 |
| 1581 | R.RSTLM[+15.995]VSDVTR.L | M[+16] | 427.559 | 3 | 1280.664 | 1280.663 | 0 | 0.7 | 3447 | 352.3 | 352.3 | 352.3 | 5.86 |
| 1242 | R.STLMVSDVTRLQHVTISQLFAPGDLPELGLEHR.A | | 915.737 | 4 | 3659.925 | 3659.921 | 0 | 0.9 | 3448 | 718.2 | 718.2 | 718.2 | 11.85 |
| 1242 | R.STLMVSDVTRLQHVTISQLFAPGDLPELGLEHR.A | | 732.791 | 5 | 3659.924 | 3659.921 | 0 | 0.8 | 3448 | 637.5 | 637.5 | 637.5 | 9.85 |
| 845 | R.STLMVSDVTR.L | | 554.787 | 2 | 1108.567 | 1108.567 | 0 | −0.1 | 3448 | 510.7 | 510.7 | 510.7 | 8.23 |
| 845 | R.STLMVSDVTR.L | | 554.787 | 2 | 1108.567 | 1108.567 | 0 | 0.0 | 3448 | 530.1 | 530.1 | 530.1 | 8.14 |
| 1579 | R.STLM[+15.995]VSDVTR.L | M[+16] | 562.784 | 2 | 1124.561 | 1124.562 | 0 | −0.2 | 3448 | 457.3 | 457.3 | 457.3 | 8.02 |
| 1579 | R.STLM[+15.995]VSDVTR.L | M[+16] | 562.785 | 2 | 1124.562 | 1124.562 | 0 | 0.1 | 3448 | 446.8 | 446.8 | 446.8 | 7.60 |
| 1579 | R.STLM[+15.995]VSDVTR.L | M[+16] | 562.784 | 2 | 1124.561 | 1124.562 | 0 | −0.2 | 3448 | 439.0 | 439.0 | 439.0 | 7.44 |
| 1242 | R.STLMVSDVTRLQHVTISQLFAPGDLPELGLEHR.A | | 915.735 | 4 | 3659.919 | 3659.921 | 0 | −0.8 | 3448 | 511.3 | 511.3 | 511.3 | 6.58 |
| 845 | R.STLMVSDVTR.L | | 554.787 | 2 | 1108.567 | 1108.567 | 0 | 0.1 | 3448 | 311.7 | 311.7 | 311.7 | 5.58 |
| 979 | R.LQHVTISQLFAPGDLPELGLEHR.A | | 857.462 | 3 | 2570.372 | 2570.373 | 0 | −0.1 | 3458 | 737.8 | 737.8 | 737.8 | 12.79 |
| 979 | R.LQHVTISQLFAPGDLPELGLEHR.A | | 643.349 | 4 | 2570.372 | 2570.373 | 0 | −0.2 | 3458 | 691.1 | 691.1 | 691.1 | 11.79 |
| 1391 | R.LQHVTISQLFAPGDLPELGLEHRAEDGHEEAMETEASTSGEVA | | 1073.340 | 6 | 6435.002 | 6435.004 | 0 | −0.4 | 3458 | 693.0 | 693.0 | 693.0 | 9.65 |
| | EVAEEAMETESSEKVGK.E | | | | | | | | | | | | |
| 1391 | R.LQHVTISQLFAPGDLPELGLEHRAEDGHEEAMETEASTSGEVA | | 1073.674 | 6 | 6437.010 | 6435.004 | 2 | −0.1 | 3458 | 651.6 | 651.6 | 651.6 | 9.65 |
| | EVAEEAMETESSEKVGK.E | | | | | | | | | | | | |
| 979 | R.LQHVTISQLFAPGDLPELGLEHR.A | | 514.880 | 5 | 2570.373 | 2570.373 | 0 | 0.2 | 3458 | 542.1 | 542.1 | 542.1 | 8.58 |
| 1391 | R.LQHVTISQLFAPGDLPELGLEHRAEDGHEEAMETEASTSGEVA | | 1073.507 | 6 | 6436.006 | 6435.004 | 1 | −0.3 | 3458 | 593.3 | 593.3 | 593.3 | 7.65 |
| | EVAEEAMETESSEKVGK.E | | | | | | | | | | | | |
| 835 | R.LQHVTISQLFAPGDLPELGLEHRAEDGHEEAMETEASTSGEVA | | 879.552 | 7 | 6150.819 | 6150.819 | 0 | −0.1 | 3458 | 593.1 | 593.1 | 593.1 | 7.45 |
| | EVAEEAMETESSEK.V | | | | | | | | | | | | |
| 1391 | R.LQHVTISQLFAPGDLPELGLEHRAEDGHEEAMETEASTSGEVA | | 920.149 | 7 | 6435.002 | 6435.004 | 0 | −0.3 | 3458 | 528.1 | 528.1 | 528.1 | 6.43 |
| | EVAEEAMETESSEKVGK.E | | | | | | | | | | | | |
| 1532 | R.LQHVTISQLFAPGDLPELGLEHRAEDGHEEAMETEASTSGEVA | M[+16] | 881.837 | 7 | 6166.817 | 6166.814 | 0 | 0.5 | 3458 | 465.4 | 465.4 | 60.9 | 5.29 |
| | EVAEEAM[+15.995]ETESSEK.V | | | | | | | | | | | | |
| 1835 | R.LQHVTISQLFAPGDLPELGLEHRAEDGHEEAMETEASTSGEVA | | 1231.372 | 5 | 6152.830 | 6150.819 | 2 | 0.7 | 3458 | 387.1 | 387.1 | 387.1 | 5.15 |
| | EVAEEAMETESSEK.V | | | | | | | | | | | | |
| 835 | R.LQHVTISQLFAPGDLPELGLEHRAEDGHEEAMETEASTSGEVA | | 879.696 | 7 | 6151.829 | 6150.819 | 1 | 1.0 | 3458 | 409.7 | 409.7 | 409.7 | 4.85 |
| | EVAEEAMETESSEK.V | | | | | | | | | | | | |
| 835 | R.LQHVTISQLFAPGDLPELGLEHRAEDGHEEAMETEASTSGEVA | | 879.553 | 7 | 6150.825 | 6150.819 | 0 | 0.9 | 3458 | 463.6 | 358.3 | 358.3 | 4.11 |
| | EVAEEAMETESSEK.V | | | | | | | | | | | | |
| 835 | R.LQHVTISQLFAPGDLPELGLEHRAEDGHEEAMETEASTSGEVA | | 879.552 | 7 | 6150.819 | 6150.819 | 0 | 0.0 | 3458 | 383.6 | 285.9 | 285.9 | 3.65 |
| | EVAEEAMETESSEK.V | | | | | | | | | | | | |
| 954 | R.AEDGHEEAMETEASTSGEVAEVAEEAMETESSEKVGKETSEL | | 1129.904 | 5 | 5645.492 | 5644.492 | 1 | −0.6 | 3481 | 845.9 | 845.9 | 845.9 | 11.73 |
| | GGSDVSILDTTR.L | | | | | | | | | | | | |
| 3260 | R.AEDGHEEAM[+15.995]ETEASTSGEVAEVAEEAMETESSEKV | M[+16] | 1132.903 | 5 | 5660.487 | 5660.487 | 0 | 0.0 | 3481 | 781.9 | 781.9 | 397.6 | 11.65 |
| | GKETSELGGSDVSILDTTR.L | | | | | | | | | | | | |
| 948 | R.AEDGHEEAMETEASTSGEVAEVAEEAMETESSEK.V | | 1200.493 | 3 | 3599.464 | 3599.464 | 0 | −0.1 | 3481 | 697.3 | 697.3 | 697.3 | 11.11 |
| 948 | R.AEDGHEEAMETEASTSGEVAEVAEEAMETESSEK.V | | 900.621 | 4 | 3599.462 | 3599.464 | 0 | −0.8 | 3481 | 708.9 | 708.9 | 708.9 | 10.66 |
| 939 | R.AEDGHEEAMETEASTSGEVAEVAEEAMETESSEKVGK.E | | 971.669 | 4 | 3883.654 | 3883.649 | 0 | 1.2 | 3481 | 642.2 | 642.2 | 642.2 | 9.85 |
| 948 | R.AEDGHEEAMETEASTSGEVAEVAEEAMETESSEK.V | | 1200.494 | 3 | 3599.466 | 3599.464 | 0 | 0.4 | 3481 | 593.4 | 593.4 | 593.4 | 9.11 |
| 939 | R.AEDGHEEAMETEASTSGEVAEVAEEAMETESSEKVGK.E | | 1295.223 | 3 | 3883.654 | 3883.649 | 0 | 1.1 | 3481 | 555.4 | 555.4 | 555.4 | 8.18 |
| 954 | R.AEDGHEEAMETEASTSGEVAEVAEEAMETESSEKVGKETSEL | | 1411.879 | 4 | 5644.493 | 5644.492 | 0 | 0.2 | 3481 | 611.6 | 611.6 | 611.6 | 8.10 |
| | GGSDVSILDTTR.L | | | | | | | | | | | | |
| 954 | R.AEDGHEEAMETEASTSGEVAEVAEEAMETESSEKVGKETSEL | | 1129.705 | 5 | 5644.495 | 5644.492 | 0 | 0.5 | 3481 | 629.5 | 629.5 | 629.5 | 7.88 |
| | GGSDVSILDTTR.L | | | | | | | | | | | | |
| 948 | R.AEDGHEEAMETEASTSGEVAEVAEEAMETESSEK.V | | 1200.495 | 3 | 3599.469 | 3599.464 | 0 | 1.3 | 3481 | 520.3 | 520.3 | 520.3 | 7.67 |
| 939 | R.AEDGHEEAMETEASTSGEVAEVAEEAMETESSEKVGK.E | | 777.536 | 5 | 3883.650 | 3883.649 | 0 | 0.1 | 3481 | 574.0 | 574.0 | 574.0 | 7.55 |
| 954 | R.AEDGHEEAMETEASTSGEVAEVAEEAMETESSEKVGKETSEL | | 1129.704 | 5 | 5644.491 | 5644.492 | 0 | −0.1 | 3481 | 556.3 | 556.3 | 556.3 | 6.98 |
| | GGSDVSILDTTR.L | | | | | | | | | | | | |
| 948 | R.AEDGHEEAMETEASTSGEVAEVAEEAMETESSEK.V | | 900.622 | 4 | 3599.467 | 3599.464 | 0 | 0.7 | 3481 | 452.9 | 452.9 | 452.9 | 6.59 |
| 954 | R.AEDGHEEAMETEASTSGEVAEVAEEAMETESSEKVGKETSEL | | 941.588 | 6 | 5644.491 | 5644.492 | 0 | −0.2 | 3481 | 592.6 | 592.6 | 592.6 | 6.14 |
| | GGSDVSILDTTR.L | | | | | | | | | | | | |
| 954 | R.AEDGHEEAMETEASTSGEVAEVAEEAMETESSEKVGKETSEL | | 1411.878 | 4 | 5644.489 | 5644.492 | 0 | −0.5 | 3481 | 542.1 | 542.1 | 542.1 | 6.06 |
| | GGSDVSILDTTR.L | | | | | | | | | | | | |
| 3073 | R.AEDGHEEAMETEASTSGEVAEVAEEAMETES[+79.966]SEK | S[+80] | 1145.900 | 5 | 5725.468 | 5724.458 | 1 | 1.2 | 3481 | 454.1 | 454.1 | 0.2 | 5.67 |
| | VGKETSELGGSDVSILDTTR.L | | | | | | | | | | | | |
| 4655 | R.AEDGHEEAMETEASTSGEVAEVAEEAMET[+79.966]ESSEK | T[+80] | 1146.099 | 5 | 5726.466 | 5724.458 | 2 | 0.2 | 3481 | 410.7 | 410.7 | 21.2 | 5.51 |
| | VGKETSELGGSDVSILDTTR.L | | | | | | | | | | | | |
| 3072 | R.AEDGHEEAMETEAS[+79.966]TSGEVAEVAEEAMETESSEK | S[+80] | 1145.700 | 5 | 5724.473 | 5724.458 | 0 | 2.5 | 3481 | 436.7 | 436.7 | 13.3 | 4.03 |
| | VGKETSELGGSDVSILDTTR.L | | | | | | | | | | | | |
| 954 | R.AEDGHEEAMETEASTSGEVAEVAEEAMETESSEKVGKETSEL | | 1412.380 | 4 | 5646.497 | 5644.492 | 2 | −0.3 | 3481 | 350.0 | 350.0 | 350.0 | 3.92 |
| | GGSDVSILDTTR.L | | | | | | | | | | | | |
| 988 | K.VGKETSELGGSDVSILDTTR.L | | 1032.526 | 2 | 2064.044 | 2064.046 | 0 | −0.7 | 3515 | 646.1 | 646.1 | 646.1 | 9.61 |
| 988 | K.VGKETSELGGSDVSILDTTR.L | | 688.687 | 3 | 2064.045 | 2064.046 | 0 | −0.2 | 3515 | 543.5 | 543.5 | 543.5 | 8.86 |
| 1119 | K.VGKETSELGGSDVSILDTTRLLR.S | | 612.335 | 4 | 2446.316 | 2446.315 | 0 | 0.6 | 3515 | 463.4 | 463.4 | 463.4 | 8.18 |
| 1827 | K.ETSELGGSDVSILDTTR.L | | 890.433 | 2 | 1779.860 | 1779.861 | 0 | −0.6 | 3518 | 687.7 | 687.7 | 687.7 | 10.87 |
| 827 | K.ETSELGGSDVSILDTTR.L | | 890.434 | 2 | 1779.861 | 1779.861 | 0 | 0.1 | 3518 | 459.2 | 459.2 | 459.2 | 8.78 |
| 827 | K.ETSELGGSDVSILDTTR.L | | 593.958 | 3 | 1779.860 | 1779.861 | 0 | −0.3 | 3518 | 314.5 | 314.5 | 314.5 | 5.25 |
| 1679 | R.SC[+57.021]VQSAVGMLRDQNESC[+57.021]TR.N | C[+57]* | 733.330 | 3 | 2197.976 | 2197.975 | 0 | 0.5 | 3538 | 535.9 | 535.9 | 535.9 | 8.86 |
| | | 2 | | | | | | | | | | | |
| 1713 | R.SC[+57.021]VQSAVGMLR.D | C[+57 | 604.300 | 2 | 1207.593 | 1207.592 | 0 | 0.4 | 3538 | 559.5 | 471.4 | 471.4 | 8.36 |
| 3279 | R.SC[+57.021]VQSAVGM[+15.995]LR.D | C[+57], | 612.298 | 2 | 1223.588 | 1223.587 | 0 | 0.6 | 3538 | 486.8 | 486.8 | 486.8 | 8.01 |
| | | M[+16] | | | | | | | | | | | |
| 3279 | R.SC[+57.021]VQSAVGM[+15.995]LR.D | C[+57], | 612.298 | 2 | 1223.588 | 1223.587 | 0 | 0.6 | 3538 | 355.1 | 355.1 | 355.1 | 6.04 |
| | | M[+16] | | | | | | | | | | | |
| 1727 | R.VVLLLGLLNEDDAC[+57.021]HASFLR.V | C[+57] | 752.400 | 3 | 2255.186 | 2255.185 | 0 | 0.4 | 3561 | 692.2 | 692.2 | 692.2 | 11.79 |
| 1727 | R.VVLLLGLLNEDDAC[+57.021]HASFLR.V | C[+57] | 752.400 | 3 | 2255.187 | 2255.185 | 0 | 0.6 | 3561 | 308.0 | 308.0 | 308.0 | 5.97 |
| 828 | R.LSVFLKKQEESQFHPLEWLAR.E | | 647.102 | 1 | 2585.388 | 2585.388 | 0 | 0.2 | 3586 | 484.6 | 484.6 | 484.6 | 7.84 |
| 828 | R.LSVFLKKQEESQFHPLEWLAR.E | | 518.084 | 5 | 2586.390 | 2585.388 | 1 | −0.2 | 3586 | 423.6 | 423.6 | 423.6 | 7.25 |
| 828 | R.LSVFLKKQEESQFHPLEWLAR.E | | 517.883 | 5 | 2585.386 | 2585.388 | 0 | −0.8 | 3586 | 405.1 | 405.1 | 405.1 | 6.55 |
| 1038 | K.KQEESQFHPLEWLAR.E | | 475.244 | 4 | 1897.956 | 1897.956 | 0 | 0.1 | 3592 | 427.8 | 427.8 | 427.8 | 7.64 |
| 1038 | K.KQEESQFHPLEWLAR.E | | 949.482 | 2 | 1897.956 | 1897.956 | 0 | 0.2 | 3592 | 533.3 | 533.3 | 533.3 | 7.57 |
| 1038 | K.KQEESQFHPLEWLAR.E | | 633.324 | 3 | 1897.958 | 1897.956 | 0 | 1.1 | 3592 | 378.5 | 378.5 | 378.5 | 7.53 |
| 859 | K.QEESQFHPLEWLAR.E | | 885.435 | 2 | 1769.863 | 1769.861 | 0 | 1.2 | 3593 | 697.1 | 697.1 | 697.1 | 11.58 |
| 859 | K.QEESQFHPLEWLAR.E | | 590.625 | 3 | 1769.861 | 1769.861 | 0 | 0.2 | 3593 | 462.0 | 462.0 | 462.0 | 8.02 |
| 1739 | R.EAC[+57.021]NQDALQEAGTFR.H | C[+57] | 855.381 | 2 | 1709.755 | 1709.755 | 0 | 0.3 | 3607 | 597.4 | 597.4 | 597.4 | 9.58 |
| 1739 | R.EAC[+57.021]NQDALQEAGTFR.H | C[+57] | 570.590 | 3 | 1709.755 | 1709.755 | 0 | 0.2 | 3607 | 482.9 | 482.9 | 482.9 | 7.47 |
| 1739 | R.EAC[+57.021]NQDALQEAGTFR.H | C[+57] | 570.590 | 3 | 1709.754 | 1709.755 | 0 | −0.3 | 3607 | 454.6 | 454.6 | 454.6 | 7.26 |
| 1739 | R.EAC[+57.021]NQDALQEAGTFR.H | C[+57] | 570.590 | 3 | 1709.755 | 1709.755 | 0 | −0.1 | 3607 | 405.0 | 405.0 | 405.0 | 6.90 |
| 1739 | R.EAC[+57.021]NQDALQEAGTFR.H | C[+57] | 570.590 | 3 | 1709.755 | 1709.755 | 0 | 0.1 | 3607 | 334.5 | 334.5 | 334.5 | 5.32 |
| 2234 | R.VQGAVTPLLASMISFIDR.D | | 640.021 | 3 | 1918.047 | 1918.047 | 0 | 0.4 | 3628 | 444.2 | 444.2 | 444.2 | 7.69 |
| 4035 | R.VQGAVTPLLASMISFIDRDGNLELLTRPDTPPWARDLWMFIFSD | | 1108.072 | 6 | 6643.398 | 6643.401 | 0 | −0.4 | 3628 | 497.1 | 497.1 | 497.1 | 4.23 |
| | TMLLNIPLVMNNER.H | | | | | | | | | | | | |
| 1214 | K.IKDYLEELWVQAQYITDAEGLPK.K | | 908.138 | 3 | 2722.400 | 2722.397 | 0 | 0.8 | 3715 | 613.0 | 613.0 | 613.0 | 10.53 |
| 1094 | K.IKDYLEELWVQAQYITDAEGLPKK.F | | 713.379 | 4 | 2850.494 | 2850.492 | 0 | 0.6 | 3715 | 502.3 | 502.3 | 502.3 | 8.39 |
| 1094 | K.IKDYLEELWVQAQYITDAEGLPKK.F | | 570.905 | 5 | 2850.494 | 2850.492 | 0 | 0.4 | 3715 | 556.5 | 556.5 | 556.5 | 7.98 |
| 1214 | K.IKDYLEELWVQAQYITDAEGLPK.K | | 681.356 | 4 | 2722.400 | 2722.397 | 0 | 1.0 | 3715 | 311.8 | 311.8 | 311.8 | 4.99 |
| 1856 | K.KFVDIFQQTPLGR.F | | 774.930 | 2 | 1548.853 | 1548.853 | 0 | −0.4 | 3738 | 447.4 | 447.4 | 447.4 | 8.02 |
| 1379 | R.KLKAASEAPEEEVSLPWVHLAYQR.F | | 688.617 | 4 | 2751.447 | 2751.446 | 0 | 0.1 | 3797 | 675.3 | 675.3 | 675.3 | 11.53 |
| 1379 | R.KLKAASEAPEEEVSLPWVHLAYQR.F | | 551.095 | 5 | 2751.447 | 2751.446 | 0 | 0.3 | 3797 | 375.4 | 375.4 | 375.4 | 7.27 |
| 1379 | R.KLKAASEAPEEEVSLPWVHLAYQR.F | | 688.618 | 4 | 2751.449 | 2751.446 | 0 | 0.8 | 3797 | 335.0 | 335.0 | 335.0 | 5.99 |
| 1167 | K.LKAASEAPEEEVSLPWVHLAYQR.F | | 656.593 | 4 | 2623.351 | 2623.352 | 0 | −0.3 | 3798 | 679.8 | 679.8 | 679.8 | 11.53 |
| 1167 | K.LKAASEAPEEEVSLPWVHLAYQR.F | | 875.122 | 3 | 2623.351 | 2623.352 | 0 | −0.2 | 3798 | 668.2 | 668.2 | 668.2 | 11.53 |
| 1273 | K.AASEAPEEEVSLPWVHLAYQR.F | | 794.729 | 3 | 2382.173 | 2382.173 | 0 | 0.2 | 3800 | 682.3 | 682.3 | 682.3 | 11.79 |
| 1273 | K.AASEAPEEEVSLPWVHLAYQR.F | | 1191.590 | 2 | 2382.172 | 2382.173 | 0 | −0.3 | 3800 | 598.7 | 598.7 | 598.7 | 9.79 |
| 947 | R.ILTIYPQVLHSLMEAR.W | | 628.686 | 3 | 1884.043 | 1884.041 | 0 | 0.7 | 3831 | 597.9 | 597.9 | 597.9 | 9.58 |
| 947 | R.ILTIYPQVLHSLMEAR.W | | 628.685 | 3 | 1884.041 | 1884.041 | 0 | 0.1 | 3831 | 521.8 | 521.8 | 521.8 | 8.91 |
| 947 | R.ILTIYPQVLHSLMEAR.W | | 628.685 | 3 | 1884.042 | 1884.041 | 0 | 0.2 | 3831 | 475.7 | 475.7 | 475.7 | 8.57 |
| 947 | R.ILTIYPQVLHSLMEAR.W | | 942.525 | 2 | 1884.043 | 1884.041 | 0 | 1.0 | 3831 | 475.3 | 475.3 | 475.3 | 8.57 |
| 947 | R.ILTIYPQVLHSLMEAR.W | | 628.686 | 3 | 1884.042 | 1884.041 | 0 | 0.3 | 3831 | 453.4 | 453.4 | 453.4 | 8.02 |
| 1588 | R.ILTIYPQVLHSLM[+15.995]EAR.W | M[+16] | 951.023 | 2 | 1901.039 | 1900.036 | 1 | −0.1 | 3831 | 366.8 | 366.8 | 366.8 | 7.53 |
| 1588 | R.ILTIYPQVLHSLM[+15.995]EAR.W | M[+16] | 634.351 | 3 | 1901.039 | 1900.036 | 1 | 0.0 | 3831 | 354.3 | 354.3 | 354.3 | 6.24 |
| 1588 | R.ILTIYPQVLHSLM[+15.995]EAR.W | M[+16] | 634.017 | 3 | 1900.036 | 1900.036 | 0 | −0.1 | 3831 | 308.3 | 308.3 | 308.3 | 5.97 |
| 992 | R.NTLKPSPQAWLQLVK.N | | 575.001 | 3 | 1722.990 | 1722.990 | 0 | −0.3 | 3873 | 720.3 | 720.3 | 720.3 | 12.58 |
| 992 | R.NTLKPSPQAWLQLVK.N | | 575.002 | 3 | 1722.990 | 1722.990 | 0 | 0.1 | 3873 | 676.3 | 676.3 | 676.3 | 11.58 |
| 992 | R.NTLKPSPQAWLQLVK.N | | 575.002 | 3 | 1722.990 | 1722.990 | 0 | −0.1 | 3873 | 659.9 | 659.9 | 659.9 | 11.58 |
| 992 | R.NTLKPSPQAWLQLVK.N | | 861.999 | 2 | 1722.990 | 1722.990 | 0 | 0.1 | 3873 | 559.8 | 559.8 | 559.8 | 8.91 |
| 2814 | R.IFSTALFVEHVLLGTESR.V | | 673.702 | 3 | 2019.093 | 2019.091 | 0 | 0.8 | 3923 | 662.9 | 662.9 | 662.9 | 11.79 |
| 2814 | R.IFSTALFVEHVLLGTESR.V | | 673.703 | 3 | 2019.095 | 2019.091 | 0 | 2.0 | 3923 | 521.9 | 521.9 | 521.9 | 7.27 |
| 1047 | R.VPELQGLVTEHVFLLDK.C | | 646.363 | 3 | 1937.075 | 1937.074 | 0 | 0.2 | 3941 | 575.0 | 575.0 | 575.0 | 9.79 |
| 1047 | R.VPELQGLVTEHVFLLDK.C | | 969.043 | 2 | 1937.078 | 1937.074 | 0 | 2.1 | 3941 | 422.3 | 422.3 | 422.3 | 7.32 |
| 3298 | K.C[+57.021]LRENSDVKTHGPFEAVMR.T | C[+57] | 562.272 | 4 | 2246.067 | 2246.081 | 0 | −5.9 | 3958 | 333.1 | 333.1 | 333.1 | 4.02 |
| 1090 | R.ENSDVKTHGPFEAVMR.T | | 606.293 | 3 | 1816.865 | 1816.865 | 0 | 0.2 | 3961 | 645.6 | 645.6 | 645.6 | 10.32 |
| 1090 | R.ENSDVKTHGPFEAVMR.T | | 606.293 | 3 | 1816.864 | 1816.865 | 0 | −0.6 | 3961 | 626.3 | 626.3 | 626.3 | 9.41 |
| 1090 | R.ENSDVKTHGPFEAVMR.T | | 454.972 | 4 | 1816.866 | 1816.865 | 0 | 0.5 | 3961 | 443.6 | 443.6 | 443.6 | 8.31 |
| 1090 | R.ENSDVKTHGPFEAVMR.T | | 908.936 | 2 | 1816.864 | 1816.865 | 0 | −0.1 | 3961 | 450.5 | 450.5 | 450.5 | 6.42 |
| 1090 | R.ENSDVKTHGPFEAVMR.T | | 454.972 | 4 | 1816.864 | 1816.865 | 0 | −0.2 | 3961 | 358.3 | 358.3 | 358.3 | 5.78 |
| 825 | K.THGPFEAVMR.T | | 572.782 | 2 | 1144.557 | 1144.557 | 0 | 0.0 | 3967 | 477.2 | 477.2 | 477.2 | 7.80 |
| 825 | K.THGPFEAVMR.T | | 572.782 | 2 | 1144.556 | 1144.557 | 0 | −0.3 | 3967 | 467.6 | 467.6 | 467.6 | 7.80 |
| 825 | K.THGPFEAVMR.T | | 572.782 | 2 | 1144.557 | 1144.557 | 0 | 0.0 | 3967 | 421.6 | 421.6 | 421.6 | 7.44 |
| 1681 | R.AWFASEQMIC[+57.021]PYC[+57.021]LTALPDEFSPAVS | C[+57]* | 1161.538 | 3 | 3482.600 | 3482.597 | 0 | 0.8 | 4023 | 791.4 | 693.2 | 693.2 | 13.12 |
| | QAHR.E | 2 | | | | | | | | | | | |
| 856 | K.DNAPPEKEVIESLLSLLFVQK.G | | 790.438 | 3 | 2369.298 | 2369.296 | 0 | 0.7 | 4080 | 563.9 | 563.9 | 563.9 | 9.53 |
| 856 | K.DNAPPEKEVIESLLSLLFVQK.G | | 1185.153 | 2 | 2369.298 | 2369.296 | 0 | 0.7 | 4080 | 444.4 | 444.4 | 444.4 | 7.97 |
| 856 | K.DNAPPEKEVIESLLSLLFVQK.G | | 593.080 | 4 | 2369.297 | 2369.296 | 0 | 0.4 | 4080 | 366.4 | 366.4 | 366.4 | 6.94 |
| 2072 | K.SLSPFNDVVDKTPVIR.S | | 596.328 | 3 | 1786.970 | 1786.970 | 0 | 0.2 | 4116 | 488.0 | 488.0 | 488.0 | 8.52 |
| 2072 | K.SLSPFNDVVDKTPVIR.S | | 893.989 | 2 | 1786.971 | 1786.970 | 0 | 0.5 | 4116 | 466.0 | 466.0 | 466.0 | 8.31 |
| 2072 | K.SLSPFNDVVDKTPVIR.S | | 596.328 | 3 | 1786.970 | 1786.970 | 0 | −0.2 | 4116 | 459.2 | 459.2 | 459.2 | 7.54 |
| 1408 | K.TSAYSRNDELNHLEEEGR.F | | 707.327 | 3 | 2119.965 | 2119.964 | 0 | 0.5 | 4186 | 731.0 | 731.0 | 731.0 | 12.53 |
| 936 | K.TSAYSRNDELNHLEEEGRFLK.A | | 627.808 | 4 | 2508.212 | 2508.211 | 0 | 0.1 | 4186 | 430.7 | 430.7 | 430.7 | 7.47 |
| 1408 | K.TSAYSRNDELNHLEEEGR.F | | 530.746 | 4 | 2119.963 | 2119.964 | 0 | −0.4 | 4186 | 382.6 | 382.6 | 382.6 | 7.47 |
| 936 | K.TSAYSRNDELNHLEEEGRFLK.A | | 502.649 | 5 | 2509.215 | 2508.211 | 1 | 0.2 | 4186 | 424.5 | 424.5 | 21.6 | 7.25 |
| 936 | K.TSAYSRNDELNHLEEEGRFLK.A | | 502.448 | 5 | 2508.210 | 2508.211 | 0 | −0.4 | 4186 | 371.6 | 371.6 | 371.6 | 7.14 |
| 936 | K.TSAYSRNDELNHLEEEGRFLK.A | | 836.741 | 3 | 2508.209 | 2508.211 | 0 | −0.8 | 4186 | 598.5 | 598.5 | 598.5 | 6.93 |
| 936 | K.TSAYSRNDELNHLEEEGRFLK.A | | 836.742 | 3 | 2508.210 | 2508.211 | 0 | −0.4 | 4186 | 535.9 | 535.9 | 535.9 | 6.26 |
| 936 | K.TSAYSRNDELNHLEEEGRFLK.A | | 502.448 | 5 | 2508.210 | 2508.211 | 0 | −0.6 | 4186 | 372.7 | 372.7 | 372.7 | 6.22 |
| 936 | K.TSAYSRNDELNHLEEEGRFLK.A | | 627.809 | 4 | 2508.212 | 2508.211 | 0 | 0.3 | 4186 | 317.1 | 317.1 | 317.1 | 5.37 |
| 1408 | K.TSAYSRNDELNHLEEEGR.F | | 1060.485 | 2 | 2119.962 | 2119.964 | 0 | −0.8 | 4186 | 311.0 | 311.0 | 311.0 | 3.65 |
| 3090 | K.TSAYSRNDELN[+0.984]HLEEEGR.F | N[+1] | 1061.489 | 2 | 2121.970 | 2120.948 | 1 | 9.0 | 4186 | 330.3 | 330.3 | 23.8 | 3.27 |
| 1494 | R.N[+0.984]DELNHLEEEGRFLK.A | N[+1] | 615.299 | 3 | 1843.882 | 1843.882 | 0 | −0.3 | 4192 | 703.3 | 703.3 | 312.3 | 12.32 |
| 978 | R.NDELNHLEEEGRFLK.A | | 614.971 | 3 | 1842.898 | 1842.898 | 0 | −0.1 | 4192 | 629.6 | 629.6 | 629.6 | 10.32 |
| 807 | R.NDELNHLEEEGR.F | | 485.555 | 3 | 1454.650 | 1454.651 | 0 | −0.3 | 4192 | 585.3 | 585.3 | 585.3 | 9.58 |
| 978 | R.NDELNHLEEEGRFLK.A | | 614.971 | 3 | 1842.898 | 1842.898 | 0 | −0.2 | 4192 | 599.8 | 599.8 | 599.8 | 9.32 |
| 1496 | R.NDELN[+0.984]HLEEEGR.F | N[+1] | 485.883 | 3 | 1455.634 | 1455.635 | 0 | −0.1 | 4192 | 493.7 | 493.7 | 310.7 | 8.23 |
| 807 | R.NDELNHLEEEGR.F | | 485.555 | 3 | 1454.650 | 1454.651 | 0 | −0.2 | 4192 | 482.8 | 482.8 | 482.8 | 8.01 |
| 978 | R.NDELNHLEEEGRFLK.A | | 461.480 | 4 | 1842.898 | 1842.898 | 0 | 0.0 | 4192 | 486.6 | 486.6 | 486.6 | 7.97 |
| 807 | R.NDELNHLEEEGR.F | | 727.828 | 2 | 1454.650 | 1454.651 | 0 | −0.8 | 4192 | 498.0 | 498.0 | 498.0 | 7.86 |
| 1488 | R.NDELN[+0.984]HLEEEGRFLK.A | N[+1] | 615.299 | 3 | 1843.882 | 1843.882 | 0 | −0.3 | 4192 | 420.0 | 420.0 | 336.6 | 7.60 |
| 1488 | R.NDELN[+0.984]HLEEEGRFLK.A | N[+1] | 461.726 | 4 | 1843.882 | 1843.882 | 0 | −0.1 | 4192 | 418.7 | 418.7 | 37.0 | 7.60 |
| 1494 | R.N[+0.984]DELNHLEEEGRFLK.A | N[+1] | 461.726 | 4 | 1843.882 | 1843.882 | 0 | −0.1 | 4192 | 386.9 | 386.9 | 85.6 | 7.27 |
| 1494 | R.N[+0.984]DELNHLEEEGRFLK.A | N[+1] | 461.726 | 4 | 1843.882 | 1843.882 | 0 | 0.1 | 4192 | 374.3 | 374.3 | 54.1 | 7.27 |
| 978 | R.NDELNHLEEEGRFLK.A | | 461.480 | 4 | 1842.899 | 1842.898 | 0 | 0.3 | 4192 | 370.0 | 370.0 | 370.0 | 7.06 |
| 978 | R.NDELNHLEEEGRFLK.A | | 461.480 | 1 | 1842.899 | 1842.898 | 0 | 0.3 | 4192 | 358.6 | 358.6 | 358.6 | 5.78 |
| 1496 | R.NDELN[+0.984]HLEEEGR.F | N[+1] | 486.217 | 3 | 1456.637 | 1455.635 | 1 | −0.6 | 4192 | 466.8 | 466.8 | 349.0 | 5.10 |
| 978 | R.NDELNHLEEEGRFLK.A | | 461.733 | 4 | 1843.910 | 1842.898 | 1 | 4.6 | 4192 | 322.8 | 322.8 | 322.8 | 4.17 |
| 2409 | R.FLKAYSPASR.G | | 570.314 | 2 | 1139.621 | 1139.621 | 0 | 0.3 | 4204 | 455.3 | 455.3 | 455.3 | 7.54 |
| 831 | R.GREPANEASVEYLQEVAR.I | | 1009.501 | 2 | 2017.994 | 2017.994 | 0 | 0.2 | 4214 | 532.6 | 532.6 | 532.6 | 8.86 |
| 831 | R.GREPANEASVEYLQEVAR.I | | 1009.501 | 2 | 2017.994 | 2017.994 | 0 | 0.3 | 4214 | 469.1 | 469.1 | 469.1 | 8.52 |
| 831 | R.GREPANEASVEYLQEVAR.I | | 673.336 | 3 | 2017.994 | 2017.994 | 0 | 0.2 | 4214 | 511.1 | 511.1 | 511.1 | 8.18 |
| 831 | R.GREPANEASVEYLQEVAR.I | | 673.337 | 3 | 2017.995 | 2017.994 | 0 | 0.8 | 4214 | 455.3 | 455.3 | 455.3 | 7.97 |
| 831 | R.GREPANEASVEYLQEVAR.I | | 673.336 | 3 | 2017.994 | 2017.994 | 0 | 0.1 | 4214 | 412.4 | 412.4 | 412.4 | 7.39 |
| 831 | R.GREPANEASVEYLQEVAR.I | | 505.254 | 4 | 2017.995 | 2017.994 | 0 | 0.4 | 4214 | 339.8 | 339.8 | 339.8 | 5.45 |
| 1696 | R.IRLC[+57.021]LDR.A | C[+57] | 473.269 | 2 | 945.530 | 945.530 | 0 | −0.1 | 4232 | 362.8 | 362.8 | 362.8 | 6.48 |
| 929 | R.AADFLSEPEGGPEMAK.E | | 824.880 | 2 | 1648.753 | 1648.752 | 0 | 0.5 | 4239 | 655.4 | 655.4 | 655.4 | 11.58 |
| 1232 | R.AADFLSEPEGGPEMAKEK.Q | | 635.969 | 3 | 1905.891 | 1905.890 | 0 | 0.6 | 4239 | 647.5 | 647.5 | 647.5 | 10.53 |
| 1232 | R.AADFLSEPEGGPEMAKEK.Q | | 953.449 | 2 | 1905.890 | 1905.890 | 0 | 0.3 | 4239 | 587.0 | 587.0 | 587.0 | 9.53 |
| 1232 | R.AADFLSEPEGGPEMAKEK.Q | | 635.969 | 3 | 1905.891 | 1905.890 | 0 | 0.6 | 4239 | 566.6 | 566.6 | 566.6 | 9.53 |
| 1624 | R.AADFLSEPEGGPEM[+15.995]AKEK.Q | M[+16] | 641.300 | 3 | 1921.885 | 1921.885 | 0 | −0.1 | 4239 | 554.3 | 554.3 | 554.3 | 8.31 |
| 1232 | R.AADFLSEPEGGPEMAKEK.Q | | 477.228 | 4 | 1905.890 | 1905.890 | 0 | 0.3 | 4239 | 498.8 | 498.8 | 498.8 | 8.19 |
| 1618 | R.AADFLSEPEGGPEM[+15.995]AK.E | M[+16] | 832.877 | 2 | 1664.747 | 1664.747 | 0 | 0.1 | 4239 | 494.7 | 494.7 | 494.7 | 8.01 |
| 1624 | R.AADFLSEPEGGPEM[+15.995]AKEK.Q | M[+16] | 641.300 | 3 | 1921.886 | 1921.885 | 0 | 0.6 | 4239 | 484.4 | 484.4 | 484.4 | 7.95 |
| 929 | R.AADFLSEPEGGPEMAK.E | | 550.256 | 3 | 1648.753 | 1648.752 | 0 | 0.1 | 4239 | 443.5 | 443.5 | 443.5 | 7.26 |
| 1232 | R.AADFLSEPEGGPEMAKEK.Q | | 635.968 | 3 | 1905.891 | 1905.890 | 0 | 0.3 | 4239 | 331.8 | 331.8 | 331.8 | 5.99 |
| 1036 | R.GMEFVQGLSKPGRPHQWVFPK.D | | 809.091 | 3 | 2425.259 | 2425.260 | 0 | −0.4 | 4288 | 615.1 | 615.1 | 615.1 | 9.45 |
| 1036 | R.GMEFVQGLSKPGRPHQWVFPK.D | | 607.070 | 4 | 2425.260 | 2425.260 | 0 | 0.0 | 4288 | 372.9 | 372.9 | 372.9 | 7.96 |
| 1551 | R.GM[+15.995]EFVQGLSKPGRPHQWVFPK.D | M[+16] | 489.057 | 5 | 2441.255 | 2441.255 | 0 | 0.0 | 4288 | 367.7 | 367.7 | 367.7 | 7.96 |
| 1551 | R.GM[+15.995]EFVQGLSKPGRPHQWVFPK.D | M[+16] | 611.069 | 4 | 2441.256 | 2441.255 | 0 | 0.4 | 4288 | 371.3 | 365.4 | 365.4 | 7.73 |
| 3674 | R.GMEFVQGLSK.P | | 548.279 | 2 | 1095.550 | 1095.550 | 0 | −0.1 | 4288 | 397.9 | 397.9 | 397.9 | 7.32 |
| 1551 | R.GM[+15.995]EFVQGLSKPGRPHQWVFPK.D | M[+16] | 814.424 | 3 | 2441.257 | 2441.255 | 0 | 0.7 | 4288 | 512.5 | 512.5 | 512.5 | 7.09 |
| 1036 | R.GMEFVQGLSKPGRPHQWVFPK.D | | 809.091 | 3 | 2425.260 | 2425.260 | 0 | −0.1 | 4288 | 499.1 | 499.1 | 499.1 | 7.09 |
| 1036 | R.GMEFVQGLSKPGRPHQWVFPK.D | | 607.070 | 4 | 2425.260 | 2425.260 | 0 | 0.0 | 4288 | 356.9 | 356.9 | 356.9 | 6.67 |
| 1058 | K.DVVKQQGLRQDHPGQMDR.Y | | 703.020 | 3 | 2107.047 | 2107.046 | 0 | 0.3 | 4309 | 589.1 | 589.1 | 589.1 | 7.85 |
| 1058 | K.DVVKQQGLRQDHPGQMDR.Y | | 527.517 | 4 | 2107.047 | 2107.046 | 0 | 0.3 | 4309 | 348.1 | 348.1 | 348.1 | 5.85 |
| 1058 | K.DVVKQQGLRQDHPGQMDR.Y | | 422.215 | 5 | 2107.047 | 2107.046 | 0 | 0.5 | 4309 | 311.6 | 311.6 | 311.6 | 5.37 |
| 1544 | K.QQGLRQDHPGQM[+15.995]DRYLVYGDEYK.A | M[+16] | 703.833 | 4 | 2812.311 | 2812.311 | 0 | 0.0 | 4313 | 394.7 | 394.7 | 394.7 | 7.14 |
| 1880 | K.QQGLRQDHPGQMDRYLVYGDEYK.A | | 560.269 | 5 | 2797.317 | 2796.316 | 1 | −0.6 | 4313 | 368.5 | 368.5 | 368.5 | 6.22 |
| 1880 | K.QQGLRQDHPGQMDRYLVYGDEYK.A | | 560.069 | 5 | 2796.316 | 2796.316 | 0 | 0.1 | 4313 | 338.4 | 338.4 | 338.4 | 5.65 |
| 1880 | K.QQGLRQDHPGQMDRYLVYGDEYK.A | | 932.776 | 3 | 2796.315 | 2796.316 | 0 | −0.4 | 4313 | 439.5 | 439.5 | 439.5 | 5.21 |
| 1880 | K.QQGLRQDHPGQMDRYLVYGDEYK.A | | 699.834 | 4 | 2796.316 | 2796.316 | 0 | −0.1 | 4313 | 314.5 | 314.5 | 314.5 | 5.19 |
| 816 | R.QDHPGQMDRYLVYGDEYK.A | | 738.669 | 3 | 2213.992 | 2213.992 | 0 | 0.1 | 4318 | 449.6 | 449.6 | 449.6 | 7.97 |
| 816 | R.QDHPGQMDRYLVYGDEYK.A | | 554.254 | 4 | 2213.993 | 2213.992 | 0 | 0.4 | 4318 | 407.7 | 407.7 | 407.7 | 7.59 |
| 3802 | R.QDHPGQMDRYLVYGDEYKALR.D | | 511.649 | 5 | 2554.214 | 2554.214 | 0 | −0.2 | 4318 | 434.5 | 434.5 | 434.5 | 7.47 |
| 3802 | R.QDHPGQMDRYLVYGDEYKALR.D | | 511.649 | 5 | 2554.215 | 2554.214 | 0 | 0.4 | 4318 | 418.5 | 418.5 | 418.5 | 7.25 |
| 816 | R.QDHPGQMDRYLVYGDEYK.A | | 554.254 | 4 | 2213.992 | 2213.992 | 0 | 0.1 | 4318 | 371.0 | 371.0 | 371.0 | 7.09 |
| 970 | R.YLVYGDEYKALRDAVAK.A | | 494.264 | 4 | 1974.033 | 1974.033 | 0 | −0.1 | 4327 | 415.5 | 415.5 | 415.5 | 8.02 |
| 1785 | R.YLVYGDEYK.A | | 575.277 | 2 | 1149.546 | 1149.546 | 0 | −0.2 | 4327 | 453.2 | 453.2 | 453.2 | 7.80 |
| 844 | R.YLVYGDEYKALR.D | | 497.261 | 3 | 1489.769 | 1489.769 | 0 | 0.1 | 4327 | 488.7 | 488.7 | 488.7 | 7.75 |
| 1844 | R.YLVYGDEYKALR.D | | 497.261 | 3 | 1489.769 | 1489.769 | 0 | 0.3 | 4327 | 482.9 | 482.9 | 482.9 | 7.75 |
| 970 | R.YLVYGDEYKALRDAVAK.A | | 658.683 | 3 | 1974.035 | 1974.033 | 0 | 0.7 | 4327 | 455.2 | 455.2 | 455.2 | 7.63 |
| 1785 | R.YLVYGDEYK.A | | 575.277 | 2 | 1149.546 | 1149.546 | 0 | −0.3 | 4327 | 448.2 | 448.2 | 448.2 | 7.60 |
| 1785 | R.YLVYGDEYK.A | | 575.277 | 2 | 1149.546 | 1149.546 | 0 | 0.0 | 4327 | 439.9 | 439.9 | 439.9 | 7.44 |
| 1785 | R.YLVYGDEYK.A | | 575.277 | 2 | 1149.546 | 1149.546 | 0 | 0.0 | 4327 | 429.5 | 429.5 | 429.5 | 7.44 |
| 844 | R.YLVYGDEYKALR.D | | 497.261 | 3 | 1489.769 | 1489.769 | 0 | 0.1 | 4327 | 434.7 | 434.7 | 434.7 | 7.38 |
| 970 | R.YLVYGDEYKALRDAVAK.A | | 494.264 | 4 | 1974.034 | 1974.033 | 0 | 0.3 | 4327 | 378.0 | 378.0 | 378.0 | 7.14 |
| 970 | R.YLVYGDEYKALRDAVAK.A | | 658.683 | 3 | 1974.034 | 1974.033 | 0 | 0.5 | 4327 | 363.3 | 363.3 | 363.3 | 7.14 |
| 1785 | R.YLVYGDEYK.A | | 575.277 | 2 | 1149.547 | 1149.546 | 0 | 0.2 | 4327 | 386.2 | 386.2 | 386.2 | 6.87 |
| 1970 | R.YLVYGDEYKALRDAVAK.A | | 987.520 | 2 | 1974.034 | 1974.033 | 0 | 0.2 | 4327 | 469.0 | 469.0 | 469.0 | 6.84 |
| 970 | R.YLVYGDEYKALRDAVAK.A | | 494.264 | 4 | 1974.034 | 1974.033 | 0 | 0.6 | 4327 | 329.2 | 329.2 | 329.2 | 5.85 |
| 1726 | K.AVLEC[+57.021]KPLGIK.T | C[+57] | 409.909 | 3 | 1227.713 | 1227.713 | 0 | −0.1 | 4344 | 511.3 | 511.3 | 511.3 | 8.23 |
| 1726 | K.AVLEC[+57.021]KPLGIK.T | C[+57] | 409.909 | 3 | 1227.713 | 1227.713 | 0 | 0.1 | 4344 | 351.0 | 351.0 | 351.0 | 6.04 |
| 3314 | K.AC[+57.021]KTPQSQQSAYFLLTLFR.E | C[+57] | 753.725 | 3 | 2259.160 | 2259.159 | 0 | 0.5 | 4359 | 301.9 | 301.9 | 301.9 | 5.53 |
| 1194 | K.TPQSQQSAYFLLTLFR.E | | 634.004 | 3 | 1899.998 | 1899.996 | 0 | 0.9 | 4362 | 376.3 | 376.3 | 376.3 | 7.21 |
| 1878 | R.EVAILYR.S | | 432.253 | 2 | 863.499 | 863.499 | 0 | 0.1 | 4378 | 418.1 | 418.1 | 418.1 | 7.44 |
| 1878 | R.EVAILYR.S | | 432.253 | 2 | 863.499 | 863.499 | 0 | −0.1 | 4378 | 371.6 | 371.6 | 371.6 | 7.32 |
| 1878 | R.EVAILYR.S | | 432.253 | 2 | 863.499 | 863.499 | 0 | −0.1 | 4378 | 301.3 | 301.3 | 301.3 | 5.58 |
| 1685 | R.SHNASLHPTPEQC[+57.021]EAVSK.F | C[+57] | 664.647 | 3 | 1991.925 | 1991.924 | 0 | 0.6 | 4385 | 653.3 | 653.3 | 653.3 | 11.79 |
| 1685 | R.SHNASLHPTPEQC[+57.021]EAVSK.F | C[+57] | 664.647 | 3 | 1991.925 | 1991.924 | 0 | 0.5 | 4385 | 636.0 | 636.0 | 636.0 | 10.79 |
| 1685 | R.SHNASLHPTPEQC[+57.021]EAVSK.F | C[+57] | 498.736 | 4 | 1991.924 | 1991.924 | 0 | −0.1 | 4385 | 443.9 | 443.9 | 443.9 | 8.23 |
| 1759 | K.ILSPPDISR.F | | 499.287 | 2 | 997.568 | 997.568 | 0 | −0.1 | 4409 | 389.3 | 389.3 | 389.3 | 7.14 |
| 1759 | K.ILSPPDISR.F | | 499.287 | 2 | 997.568 | 997.568 | 0 | −0.2 | 4409 | 335.8 | 335.8 | 335.8 | 6.04 |
| 1759 | K.ILSPPDISR.F | | 499.287 | 2 | 997.567 | 997.568 | 0 | −0.3 | 4409 | 355.1 | 355.1 | 355.1 | 5.86 |
| 1759 | K.ILSPPDISR.F | | 499.288 | 2 | 997.568 | 997.568 | 0 | 0.1 | 4409 | 338.5 | 338.5 | 338.5 | 5.86 |
| 1759 | K.ILSPPDISR.F | | 499.288 | 2 | 997.568 | 997.568 | 0 | 0.2 | 4409 | 315.4 | 315.4 | 315.4 | 5.76 |
| 1759 | K.ILSPPDISR.F | | 499.287 | 2 | 997.567 | 997.568 | 0 | −0.2 | 4409 | 300.9 | 300.9 | 300.9 | 5.31 |
| 1782 | K.ILSPPDISRFATSLVDNSVPLLR.A | | 628.356 | 4 | 2510.400 | 2510.398 | 0 | 1.1 | 4409 | 304.2 | 304.2 | 304.2 | 5.17 |
| 3269 | K.ILSPPDIS[+79.966]RFAT[+79.966]SLVDNSVPLLRAGP | C[+57], | 1062.016 | 6 | 6367.058 | 6367.072 | 0 | −2.1 | 4409 | 359.2 | 359.2 | 3.9 | 2.07 |
| | SDSN[+0.984]LDGTVT[+79.966]EMAIHAAAVLLC | N[+1], | | | | | | | | | | | |
| | [+57.021]GQNELLEPLK.N, | S[+80] | | | | | | | | | | | |
| | | T[+80]* | | | | | | | | | | | |
| | | 2 | | | | | | | | | | | |
| 887 | R.FATSLVDNSVPLLR.A | | 766.428 | 2 | 1531.848 | 1531.848 | 0 | −0.1 | 4418 | 620.6 | 620.6 | 620.6 | 10.58 |
| 887 | R.FATSLVDNSVPLLR.A | | 766.427 | 2 | 1531.848 | 1531.848 | 0 | −0.2 | 4418 | 590.5 | 590.5 | 590.5 | 9.58 |
| 887 | R.FATSLVDNSVPLLR.A | | 766.427 | 2 | 1531.848 | 1531.848 | 0 | −0.2 | 4418 | 556.6 | 556.6 | 556.6 | 8.91 |
| 887 | R.FATSLVDNSVPLLR.A | | 766.428 | 2 | 1531.848 | 1531.848 | 0 | −0.1 | 4418 | 545.2 | 500.5 | 500.5 | 8.91 |
| 1485 | R.FATSLVDN[+0.984]SVPLLR.A | N[+1] | 766.920 | 2 | 1532.833 | 1532.832 | 0 | 0.6 | 4418 | 489.2 | 489.2 | 489.2 | 8.78 |
| 1485 | R.FATSLVDN[+0.984]SVPLLR.A | N[+1] | 766.919 | 2 | 1532.831 | 1532.832 | 0 | −0.4 | 4418 | 582.1 | 582.1 | 582.1 | 8.67 |
| 887 | R.FATSLVDNSVPLLR.A | | 511.287 | 3 | 1531.848 | 1531.848 | 0 | −0.2 | 4418 | 450.1 | 450.1 | 450.1 | 8.03 |
| 887 | R.FATSLVDNSVPLLR.A | | 766.427 | 2 | 1531.848 | 1531.848 | 0 | −0.2 | 4418 | 420.5 | 420.5 | 420.5 | 7.86 |
| 1485 | R.FATSLVDN[+0.984]SVPLLR.A | N[+1] | 511.615 | 3 | 1532.831 | 1532.832 | 0 | −0.3 | 4418 | 425.6 | 425.6 | 425.6 | 7.32 |
| 887 | R.FATSLVDNSVPLLR.A | | 511.287 | 3 | 1531.848 | 1531.848 | 0 | −0.1 | 4418 | 420.0 | 420.0 | 420.0 | 7.10 |
| 887 | R.FATSLVDNSVPLLR.A | | 511.288 | 3 | 1531.848 | 1531.848 | 0 | 0.4 | 4418 | 373.4 | 373.4 | 373.4 | 6.79 |
| 1098 | K.NLAFSPATMAHAFLPTMPEDLLAQAR.R | | 938.477 | 3 | 2813.416 | 2813.411 | 0 | 1.8 | 4467 | 799.6 | 799.6 | 799.6 | 12.49 |
| 1628 | K.NLAFSPATMAHAFLPTM[+15.995]PEDLLAQAR.R | M[+16] | 943.807 | 3 | 2829.406 | 2829.406 | 0 | −0.3 | 4467 | 674.3 | 674.3 | 160.7 | 11.79 |
| 1098 | K.NLAFSPATMAHAFLPTMPEDLLAQAR.R | | 1407.212 | 2 | 2813.417 | 2813.411 | 0 | 2.1 | 4467 | 712.1 | 600.9 | 600.9 | 11.49 |
| 1639 | K.NLAFSPATM[+15.995]AHAFLPTMPEDLLAQAR.R | M[+16] | 943.808 | 3 | 2829.408 | 2829.406 | 0 | 0.7 | 4467 | 662.2 | 662.2 | 68.0 | 11.24 |
| 1639 | K.NLAFSPATM[+15.995]AHAFLPTMPEDLLAQAR.R | M[+16] | 943.807 | 3 | 2829.407 | 2829.406 | 0 | 0.2 | 4467 | 632.7 | 632.7 | 71.1 | 10.79 |
| 941 | K.NLAFSPATMAHAFLPTMPEDLLAQARR.W | | 743.135 | 4 | 2969.517 | 2969.512 | 0 | 1.4 | 4467 | 569.8 | 569.8 | 569.8 | 9.53 |
| 1098 | K.NLAFSPATMAHAFLPTMPEDLLAQAR.R | | 704.110 | 4 | 2813.416 | 2813.411 | 0 | 1.8 | 4467 | 601.1 | 566.9 | 566.9 | 8.95 |
| 1628 | K.NLAFSPATMAHAFLPTM[+15.995]PEDLLAQAR.R | M[+16] | 944.141 | 3 | 2830.409 | 2829.406 | 1 | −0.3 | 4467 | 493.8 | 493.8 | 78.0 | 8.21 |
| 941 | K.NLAFSPATMAHAFLPTMPEDLLAQARR.W | | 743.135 | 4 | 2969.518 | 2969.512 | 0 | 1.7 | 4467 | 546.1 | 546.1 | 546.1 | 7.56 |
| 1303 | R.DGFHLVKDKADR.T | | 467.581 | 3 | 1400.727 | 1400.728 | 0 | −0.5 | 4541 | 710.8 | 710.8 | 710.8 | 9.72 |
| 2683 | K.ADRTQTGHVLGNPQRR.D | | 452.243 | 4 | 1805.949 | 1805.948 | 0 | 0.6 | 4550 | 438.5 | 438.5 | 438.5 | 7.26 |
| 2009 | R.TQTGHVLGNPQRR.D | | 488.599 | 3 | 1463.782 | 1463.783 | 0 | −0.1 | 4553 | 549.4 | 549.4 | 549.4 | 8.65 |
| 2009 | R.TQTGHVLGNPQRR.D | | 488.599 | 3 | 1463.782 | 1463.783 | 0 | −0.1 | 4553 | 518.8 | 518.8 | 518.8 | 7.97 |
| 886 | K.GFLQQHILKDLEQLAK.M | | 627.692 | 3 | 1881.061 | 1881.059 | 0 | 0.7 | 4614 | 614.7 | 614.7 | 614.7 | 10.32 |
| 886 | K.GFLQQHILKDLEQLAK.M | | 471.021 | 4 | 1881.061 | 1881.059 | 0 | 0.7 | 4614 | 461.3 | 461.3 | 461.3 | 8.31 |
| 886 | K.GFLQQHILKDLEQLAK.M | | 941.034 | 2 | 1881.061 | 1881.059 | 0 | 1.0 | 4614 | 556.6 | 556.6 | 556.6 | 7.31 |
| 3522 | K.DLEQLAK.M | | 408.727 | 2 | 816.446 | 816.446 | 0 | 0.2 | 4623 | 334.0 | 120.9 | 120.9 | 4.55 |
| 3522 | K.DLEQLAK.M | | 408.727 | 2 | 816.446 | 816.446 | 0 | 0.2 | 4623 | 353.0 | 91.4 | 91.4 | 4.29 |
| 1043 | K.MLGHSADETIGVVHLVLR.R | | 487.517 | 4 | 1947.048 | 1947.048 | 0 | 0.0 | 4630 | 748.4 | 748.4 | 748.4 | 12.79 |
| 1043 | K.MLGHSADETIGVVHLVLR.R | | 649.688 | 3 | 1947.048 | 1947.048 | 0 | 0.0 | 4630 | 665.2 | 665.2 | 665.2 | 11.79 |
| 1625 | K.M[+15.995]LGHSADETIGVVHLVLRR.L | M[+16] | 424.635 | 5 | 2119.144 | 2119.144 | 0 | 0.1 | 4630 | 588.8 | 588.8 | 588.8 | 9.53 |
| 1043 | K.MLGHSADETIGVVHLVLR.R | | 487.517 | 4 | 1947.048 | 1947.048 | 0 | −0.2 | 4630 | 457.8 | 457.8 | 457.8 | 8.78 |
| 1625 | K.M[+15.995]LGHSADETIGVVHLVLRR.L | M[+16] | 424.635 | 5 | 2119.146 | 2119.144 | 0 | 1.0 | 4630 | 517.0 | 517.0 | 517.0 | 8.72 |
| 819 | K.MLGHSADETIGVVHLVLRR.L | | 421.436 | 5 | 2103.150 | 2103.149 | 0 | 0.4 | 4630 | 504.6 | 504.6 | 504.6 | 8.72 |
| 1625 | K.M[+15.995]LGHSADETIGVVHLVLRR.L | M[+16] | 530.541 | 4 | 2119.143 | 2119.144 | 0 | −0.7 | 4630 | 553.1 | 553.1 | 553.1 | 7.94 |
| 819 | K.MLGHSADETIGVVHLVLRR.L | | 526.543 | 4 | 2103.149 | 2103.149 | 0 | −0.2 | 4630 | 392.1 | 392.1 | 392.1 | 7.27 |
| 819 | K.MLGHSADETIGVVHLVLRR.L | | 701.722 | 3 | 2103.150 | 2103.149 | 0 | 0.3 | 4630 | 345.4 | 345.4 | 345.4 | 4.64 |
| 4265 | R.RLLQEQHQLSSRR.L | | 413.484 | 4 | 1650.915 | 1650.915 | 0 | 0.2 | 4648 | 587.3 | 492.4 | 492.4 | 9.32 |
| 924 | R.RLLQEQHQLSSR.R | | 498.943 | 3 | 1494.814 | 1494.814 | 0 | 0.0 | 4648 | 319.9 | 319.9 | 319.9 | 5.76 |
| 1824 | R.LLQEQHQLSSR.R | | 446.909 | 3 | 1338.713 | 1338.712 | 0 | 0.5 | 4649 | 456.8 | 456.8 | 456.8 | 8.02 |
| 1824 | R.LLQEQHQLSSR.R | | 446.909 | 3 | 1338.712 | 1338.712 | 0 | 0.0 | 4649 | 390.7 | 390.7 | 390.7 | 7.53 |
| 1824 | R.LLQEQHQLSSR.R | | 446.909 | 3 | 1338.712 | 1338.712 | 0 | −0.4 | 4649 | 306.6 | 306.6 | 306.6 | 5.58 |
| 1111 | R.RLLNFDTELSTKEMR.N | | 463.995 | 4 | 1852.959 | 1852.959 | 0 | 0.0 | 4660 | 559.8 | 559.8 | 559.8 | 8.65 |
| 1111 | R.RLLNFDTELSTKEMR.N | | 618.325 | 3 | 1852.960 | 1852.959 | 0 | 0.9 | 4660 | 559.7 | 559.7 | 559.7 | 8.65 |
| 1111 | R.RLLNFDTELSTKEMR.N | | 463.995 | 4 | 1852.959 | 1852.959 | 0 | 0.4 | 4660 | 531.2 | 531.2 | 531.2 | 8.65 |
| 1111 | R.RLLNFDTELSTKEMR.N | | 618.325 | 3 | 1852.960 | 1852.959 | 0 | 0.9 | 4660 | 495.1 | 495.1 | 495.1 | 8.52 |
| 906 | R.RLLNFDTELSTK.E | | 718.891 | 2 | 1436.775 | 1436.774 | 0 | 0.1 | 4660 | 504.0 | 504.0 | 504.0 | 8.23 |
| 906 | R.RLLNFDTELSTK.E | | 479.596 | 3 | 1436.775 | 1436.774 | 0 | 0.1 | 4660 | 451.4 | 451.4 | 451.4 | 8.02 |
| 906 | R.RLLNFDTELSTK.E | | 479.596 | 3 | 1436.774 | 1436.774 | 0 | −0.1 | 4660 | 438.4 | 438.4 | 438.4 | 7.86 |
| 906 | R.RLLNFDTELSTK.E | | 479.596 | 3 | 1436.774 | 1436.774 | 0 | −0.1 | 4660 | 410.0 | 410.0 | 410.0 | 7.86 |
| 1484 | R.RLLN[+0.984]FDTELSTK.E | N[+1] | 479.924 | 3 | 1437.759 | 1437.758 | 0 | 0.3 | 4660 | 433.4 | 349.8 | 349.8 | 6.46 |
| 906 | R.RLLNFDTELSTK.E | | 718.891 | 2 | 1436.775 | 1436.774 | 0 | 0.1 | 4660 | 359.1 | 359.1 | 359.1 | 6.04 |
| 906 | R.RLLNFDTELSTK.E | | 479.596 | 3 | 1436.774 | 1436.774 | 0 | −0.3 | 4660 | 344.0 | 344.0 | 344.0 | 6.04 |
| 821 | R.LLNFDTELSTK.E | | 640.841 | 2 | 1280.674 | 1280.673 | 0 | 0.4 | 4661 | 427.9 | 407.2 | 407.2 | 8.41 |
| 821 | R.LLNFDTELSTK.E | | 640.841 | 2 | 1280.674 | 1280.673 | 0 | 0.7 | 4661 | 519.3 | 519.3 | 519.3 | 8.01 |
| 821 | R.LLNFDTELSTK.E | | 640.841 | 2 | 1280.674 | 1280.673 | 0 | 0.4 | 4661 | 484.1 | 429.2 | 429.2 | 8.01 |
| 821 | R.LLNFDTELSTK.E | | 640.840 | 2 | 1280.673 | 1280.673 | 0 | 0.1 | 4661 | 473.2 | 473.2 | 473.2 | 7.80 |
| 821 | R.LLNFDTELSTK.E | | 640.841 | 2 | 1280.674 | 1280.673 | 0 | 0.4 | 4661 | 446.8 | 388.9 | 388.9 | 7.80 |
| 821 | R.LLNFDTELSTK.E | | 640.840 | 2 | 1280.674 | 1280.673 | 0 | 0.2 | 4661 | 445.3 | 362.8 | 362.8 | 7.80 |
| 821 | R.LLNFDTELSTK.E | | 640.840 | 2 | 1280.674 | 1280.673 | 0 | 0.2 | 4661 | 479.5 | 458.8 | 458.8 | 7.60 |
| 873 | R.LLNFDTELSTKEMR.N | | 848.932 | 2 | 1696.858 | 1696.857 | 0 | 0.0 | 4661 | 403.1 | 403.1 | 403.1 | 7.60 |
| 873 | R.LLNFDTELSTKEMR.N | | 566.291 | 3 | 1696.857 | 1696.857 | 0 | 0.0 | 4661 | 434.7 | 434.7 | 434.7 | 7.38 |
| 821 | R.LLNFDTELSTK.E | | 640.840 | 2 | 1280.674 | 1280.673 | 0 | 0.2 | 4661 | 452.2 | 340.5 | 340.5 | 6.42 |
| 3098 | R.LLN[+0.984]FDTELSTK.E | N[+1] | 641.332 | 2 | 1281.657 | 1281.657 | 0 | −0.2 | 4661 | 401.0 | 324.5 | 324.5 | 6.08 |
| 821 | R.LLNFDTELSTK.E | | 640.841 | 2 | 1280.674 | 1280.673 | 0 | 0.4 | 4661 | 340.8 | 340.8 | 340.8 | 6.04 |
| 821 | R.LLNFDTELSTK.E | | 640.840 | 2 | 1280.674 | 1280.673 | 0 | 0.2 | 4661 | 383.4 | 311.9 | 311.9 | 5.78 |
| 821 | R.LLNFDTELSTK.E | | 427.563 | 3 | 1280.674 | 1280.673 | 0 | 0.5 | 4661 | 347.0 | 232.8 | 232.8 | 5.06 |
| 1321 | R.NNWEKEIAAVISPELEHLDK.T | | 779.070 | 3 | 2335.194 | 2335.193 | 0 | 0.5 | 4675 | 645.0 | 645.0 | 645.0 | 10.53 |
| 1498 | R.N[+0.984]NWEKEIAAVISPELEHLDK.T | N[+1] | 584.800 | 4 | 2336.178 | 2336.177 | 0 | 0.6 | 4675 | 503.1 | 503.1 | 0.0 | 8.72 |
| 1014 | R.NNWEKEIAAVISPELEHLDKTLPTMNNLISQDK.R | | 948.488 | 4 | 3790.932 | 3790.932 | 0 | −0.1 | 4675 | 593.3 | 593.3 | 593.3 | 8.52 |
| 1014 | R.NNWEKEIAAVISPELEHLDKTLPTMNNLISQDK.R | | 758.992 | 5 | 3790.933 | 3790.932 | 0 | 0.2 | 4675 | 587.4 | 587.4 | 587.4 | 8.52 |
| 1014 | R.NNWEKEIAAVISPELEHLDKTLPTMNNLISQDK.R | | 758.992 | 5 | 3790.933 | 3790.932 | 0 | 0.2 | 4675 | 586.3 | 586.3 | 586.3 | 8.52 |
| 1498 | R.N[+0.984]NWEKEIAAVISPELEHLDK.T | N[+1] | 779.398 | 3 | 2336.179 | 2336.177 | 0 | 0.9 | 4675 | 424.8 | 424.8 | 10.3 | 7.59 |
| 1498 | R.N[+0.984]NWEKEIAAVISPELEHLDK.T | N[+1] | 584.800 | 4 | 2336.179 | 2336.177 | 0 | 0.7 | 4675 | 423.5 | 423.5 | 0.0 | 7.59 |
| 1014 | R.NNWEKEIAAVISPELEHLDKTLPTMNNLISQDK.R | | 948.489 | 4 | 3790.933 | 3790.932 | 0 | 0.2 | 4675 | 559.8 | 559.8 | 559.8 | 7.08 |
| 1498 | R.N[+0.984]NWEKEIAAVISPELEHLDK.T | N[+1] | 779.398 | 3 | 2336.179 | 2336.177 | 0 | 0.9 | 4675 | 311.9 | 311.9 | 4.4 | 5.25 |
| 1321 | R.NNWEKEIAAVISPELEHLDK.T | | 1168.101 | 2 | 2335.194 | 2335.193 | 0 | 0.5 | 4675 | 371.7 | 291.0 | 291.0 | 4.99 |
| 1055 | K.EIAAVISPELEHLDKTLPTMNNLISQDKR.I | | 656.152 | 5 | 3276.733 | 3275.730 | 1 | −0.2 | 4680 | 604.5 | 604.5 | 417.1 | 9.52 |
| 1055 | K.EIAAVISPELEHLDKTLPTMNNLISQDKR.I | | 655.952 | 5 | 3275.730 | 3275.730 | 0 | −0.1 | 4680 | 561.0 | 561.0 | 561.0 | 8.52 |
| 933 | K.EIAAVISPELEHLDK.T | | 555.302 | 3 | 1663.890 | 1663.890 | 0 | 0.0 | 4680 | 505.5 | 505.5 | 505.5 | 8.23 |
| 1055 | K.EIAAVISPELEHLDKTLPTMNNLISQDKR.I | | 1092.916 | 3 | 3276.734 | 3275.730 | 1 | 0.0 | 4680 | 622.0 | 622.0 | 340.1 | 8.17 |
| 933 | K.EIAAVISPELEHLDK.T | | 555.301 | 3 | 1663.889 | 1663.890 | 0 | −0.5 | 4680 | 497.4 | 497.4 | 497.4 | 7.86 |
| 3115 | K.EIAAVISPELEHLDKTLPTMN[+0.984]NLISQDKR.I | N[+1] | 656.349 | 5 | 3277.717 | 3276.714 | 1 | −0.3 | 4680 | 458.3 | 458.3 | 46.3 | 6.74 |
| 1055 | K.EIAAVISPELEHLDKTLPTMNNLISQDKR.I | | 819.688 | 4 | 3275.730 | 3275.730 | 0 | −0.1 | 4680 | 440.9 | 440.9 | 440.9 | 6.74 |
| 1597 | K.EIAAVISPELEHLDKTLPTM[+15.995]NNLISQDKR.I | M[+16] | 823.687 | 4 | 3291.728 | 3291.725 | 0 | 0.7 | 4680 | 417.5 | 417.5 | 417.5 | 6.37 |
| 1055 | K.EIAAVISPELEHLDKTLPTMNNLISQDKR.I | | 1092.581 | 3 | 3275.729 | 3275.730 | 0 | −0.5 | 4680 | 592.1 | 592.1 | 592.1 | 6.25 |
| 1055 | K.EIAAVISPELEHLDKTLPTMNNLISQDKR.I | | 1092.581 | 3 | 3275.729 | 3275.730 | 0 | −0.5 | 4680 | 534.0 | 534.0 | 534.0 | 5.58 |
| 882 | K.TLPTMNNLISQDKR.I | | 815.933 | 2 | 1630.859 | 1630.858 | 0 | 0.4 | 4695 | 535.9 | 535.9 | 535.9 | 8.65 |
| 882 | K.TLPTMNNLISQDKR.I | | 815.933 | 2 | 1630.858 | 1630.858 | 0 | 0.1 | 4695 | 523.3 | 523.3 | 523.3 | 8.65 |
| 882 | K.TLPTMNNLISQDKR.I | | 544.291 | 3 | 1630.858 | 1630.858 | 0 | −0.1 | 4695 | 404.3 | 404.3 | 404.3 | 7.38 |
| 1574 | K.TLPTM[+15.995]NNLISQDKR.I | M[+16] | 549.622 | 3 | 1646.853 | 1646.853 | 0 | −0.2 | 4695 | 401.2 | 401.2 | 401.2 | 7.38 |
| 882 | K.TLPTMNNLISQDKR.I | | 544.291 | 3 | 1630.858 | 1630.858 | 0 | −0.2 | 4695 | 376.2 | 376.2 | 376.2 | 7.27 |
| 882 | K.TLPTMNNLISQDKR.I | | 544.291 | 3 | 1630.858 | 1630.858 | 0 | −0.1 | 4695 | 369.9 | 369.9 | 369.9 | 7.06 |
| 1574 | K.TLPTM[+15.995]NNLISQDKR.I | M[+16] | 549.622 | 3 | 1646.852 | 1646.853 | 0 | −0.6 | 4695 | 463.6 | 463.6 | 463.6 | 6.63 |
| 882 | K.TLPTMNNLISQDKR.I | | 544.291 | 3 | 1630.858 | 1630.858 | 0 | −0.2 | 4695 | 317.7 | 317.7 | 317.7 | 5.50 |
| 882 | K.TLPTMNNLISQDKR.I | | 544.291 | 3 | 1630.858 | 1630.858 | 0 | −0.3 | 4695 | 314.3 | 314.3 | 314.3 | 5.50 |
| 882 | K.TLPTMNNLISQDKR.I | | 544.291 | 3 | 1630.857 | 1630.858 | 0 | −0.4 | 4695 | 404.8 | 354.8 | 354.8 | 5.29 |
| 1838 | R.ISSNPVAK.I | | 408.235 | 2 | 815.462 | 815.462 | 0 | 0.2 | 4709 | 347.6 | 347.6 | 347.6 | 5.58 |
| 1838 | R.ISSNPVAK.I | | 408.235 | 2 | 815.462 | 815.462 | 0 | 0.0 | 4709 | 302.6 | 302.6 | 302.6 | 5.58 |
| 1172 | K.IIYGDPVTFLPHLPR.K | | 579.995 | 3 | 1737.969 | 1737.969 | 0 | 0.2 | 4717 | 682.9 | 682.9 | 682.9 | 11.58 |
| 1172 | K.IIYGDPVTFLPHLPR.K | | 579.994 | 3 | 1737.968 | 1737.969 | 0 | −0.2 | 4717 | 656.5 | 656.5 | 656.5 | 11.58 |
| 1172 | K.IIYGDPVTFLPHLPR.K | | 869.488 | 2 | 1737.969 | 1737.969 | 0 | 0.2 | 4717 | 603.4 | 603.4 | 603.4 | 10.58 |
| 1172 | K.IIYGDPVTFLPHLPR.K | | 435.247 | 4 | 1737.967 | 1737.969 | 0 | −0.7 | 4717 | 672.9 | 672.9 | 672.9 | 10.13 |
| 846 | K.IIYGDPVTFLPHLPRK.S | | 467.271 | 4 | 1866.064 | 1866.064 | 0 | 0.1 | 4717 | 599.9 | 599.9 | 599.9 | 9.32 |
| 1172 | K.IIYGDPVTFLPHLPR.K | | 579.994 | 3 | 1737.969 | 1737.969 | 0 | 0.1 | 4717 | 499.9 | 499.9 | 499.9 | 8.78 |
| 846 | K.IIYGDPVTFLPHLPRK.S | | 467.271 | 4 | 1866.064 | 1866.064 | 0 | −0.1 | 4717 | 500.4 | 500.4 | 500.4 | 7.97 |
| 846 | K.IIYGDPVTFLPHLPRK.S | | 467.272 | 4 | 1866.064 | 1866.064 | 0 | 0.2 | 4717 | 447.0 | 447.0 | 447.0 | 7.76 |
| 1172 | K.IIYGDPVTFLPHLPR.K | | 579.994 | 3 | 1737.968 | 1737.969 | 0 | −0.1 | 4717 | 336.9 | 336.9 | 336.9 | 6.04 |
| 846 | K.IIYGDPVTFLPHLPRK.S | | 933.535 | 2 | 1866.062 | 1866.064 | 0 | −0.7 | 4717 | 402.7 | 402.7 | 402.7 | 5.89 |
| 2008 | R.KRITVEYLQHIVEQK.N | | 471.773 | 4 | 1884.070 | 1884.070 | 0 | 0.1 | 4745 | 542.1 | 542.1 | 542.1 | 8.65 |
| 2008 | R.KRITVEYLQHIVEQK.N | | 471.773 | 4 | 1884.070 | 1884.070 | 0 | 0.1 | 4745 | 507.1 | 507.1 | 507.1 | 7.97 |
| 2008 | R.KRITVEYLQHIVEQK.N | | 471.773 | 4 | 1884.070 | 1884.070 | 0 | 0.1 | 4745 | 344.3 | 344.3 | 344.3 | 5.98 |
| 1159 | R.ITVEYLQHIVEQK.N | | 533.963 | 3 | 1599.874 | 1599.874 | 0 | −0.3 | 4747 | 670.9 | 670.9 | 670.9 | 11.58 |
| 1512 | R.ITVEYLQHIVEQKN[+0.984]GKER.V | N[+1] | 547.046 | 4 | 2185.161 | 2185.161 | 0 | −0.2 | 4747 | 434.6 | 434.6 | 257.4 | 8.02 |
| 1159 | R.ITVEYLQHIVEQK.N | | 533.963 | 3 | 1599.873 | 1599.874 | 0 | −0.7 | 4747 | 522.8 | 522.8 | 522.8 | 7.45 |
| 863 | R.VPILWHFLQK.E | | 427.589 | 3 | 1280.751 | 1280.751 | 0 | −0.1 | 4765 | 388.7 | 388.7 | 388.7 | 7.53 |
| 879 | R.VPILWHFLQKEAELR.L | | 470.520 | 4 | 1879.059 | 1879.059 | 0 | 0.2 | 4765 | 371.2 | 371.2 | 371.2 | 7.49 |
| 853 | K.FLPEILALQR.D | | 600.361 | 2 | 1199.714 | 1199.715 | 0 | −0.3 | 4783 | 470.1 | 470.1 | 470.1 | 7.60 |
| 853 | K.FLPEILALQR.D | | 600.361 | 2 | 1199.715 | 1199.715 | 0 | 0.2 | 4783 | 464.3 | 464.3 | 464.3 | 7.60 |
| 853 | K.FLPEILALQR.D | | 400.576 | 3 | 1199.714 | 1199.715 | 0 | −0.3 | 4783 | 455.6 | 455.6 | 455.6 | 7.06 |
| 853 | K.FLPEILALQR.D | | 600.361 | 2 | 1199.715 | 1199.715 | 0 | 0.4 | 4783 | 358.6 | 358.6 | 358.6 | 5.86 |
| 853 | K.FLPEILALQR.D | | 400.911 | 3 | 1200.717 | 1199.715 | 1 | −0.6 | 4783 | 395.0 | 395.0 | 395.0 | 4.09 |
| 1019 | R.DLVKQFQNVQQVEYSSIR.G | | 1091.068 | 2 | 2181.129 | 2181.130 | 0 | −0.3 | 4793 | 611.4 | 596.2 | 596.2 | 10.53 |
| 1019 | R.DLVKQFQNVQQVEYSSIR.G | | 1091.069 | 2 | 2181.130 | 2181.130 | 0 | 0.0 | 4793 | 593.0 | 518.6 | 518.6 | 9.53 |
| 1019 | R.DLVKQFQNVQQVEYSSIR.G | | 727.715 | 3 | 2181.132 | 2181.130 | 0 | 0.8 | 4793 | 481.2 | 481.2 | 481.2 | 8.18 |
| 1019 | R.DLVKQFQNVQQVEYSSIR.G | | 727.715 | 3 | 2181.132 | 2181.130 | 0 | 0.8 | 4793 | 434.5 | 434.5 | 434.5 | 7.81 |
| 1019 | R.DLVKQFQNVQQVEYSSIR.G | | 727.716 | 3 | 2181.132 | 2181.130 | 0 | 1.1 | 4793 | 427.5 | 427.5 | 427.5 | 7.59 |
| 1019 | R.DLVKQFQNVQQVEYSSIR.G | | 727.716 | 3 | 2181.132 | 2181.130 | 0 | 1.1 | 4793 | 319.4 | 319.4 | 319.4 | 5.71 |
| 818 | K.QFQNVQQVEYSSIR.G | | 863.432 | 2 | 1725.856 | 1725.856 | 0 | 0.1 | 4797 | 626.8 | 626.8 | 626.8 | 10.58 |
| 818 | K.QFQNVQQVEYSSIR.G | | 863.431 | 2 | 1725.855 | 1725.856 | 0 | 0.0 | 4797 | 474.9 | 474.9 | 474.9 | 8.57 |
| 1050 | K.QFQNVQQVEYSSIRGFLSK.H | | 753.390 | 3 | 2258.156 | 2258.156 | 0 | −0.1 | 4797 | 413.3 | 413.3 | 413.3 | 7.59 |
| 818 | K.QFQNVQQVEYSSIR.G | | 575.957 | 3 | 1725.856 | 1725.856 | 0 | 0.4 | 4797 | 431.8 | 431.8 | 431.8 | 7.10 |
| 818 | K.QFQNVQQVEYSSIR.G | | 575.957 | 3 | 1725.855 | 1725.856 | 0 | −0.3 | 4797 | 381.5 | 381.5 | 381.5 | 6.99 |
| 925 | R.ITVFLSTWNK.L | | 604.837 | 2 | 1208.667 | 1208.667 | 0 | −0.1 | 4829 | 402.4 | 402.4 | 402.4 | 7.44 |
| 3272 | R.SLETN[+0.984]GEINLPKDYC[+57.021]STDLDLDTEFEI | C[+57], | 1205.250 | 3 | 3613.737 | 3611.731 | 2 | −0.3 | 4842 | 755.0 | 594.1 | 83.2 | 12.85 |
| | LLPR.R | N[+1] | | | | | | | | | | | |
| 1720 | R.SLETNGEINLPKDYC[+57.021]STDLDLDTEFEILLPR.R | C[+57] | 1204.255 | 3 | 3610.750 | 3610.747 | 0 | 0.9 | 4842 | 681.2 | 681.2 | 681.2 | 10.85 |
| 1146 | R.SLETNGEINLPK.D | | 657.849 | 2 | 1314.690 | 1314.690 | 0 | 0.2 | 4842 | 605.5 | 605.5 | 605.5 | 10.58 |
| 1504 | R.SLETN[+0.984]GEINLPK.D | N[+1] | 658.341 | 2 | 1315.675 | 1315.674 | 0 | 0.6 | 4842 | 463.2 | 463.2 | 45.2 | 7.80 |
| 1720 | R.SLETNGEINLPKDYC[+57.021]STDLDLDTEFEILLPR.R | C[+57] | 903.444 | 4 | 3610.752 | 3610.747 | 0 | 1.4 | 4842 | 504.9 | 485.8 | 485.8 | 6.54 |
| 1720 | R.SLETNGEINLPKDYC[+57.021]STDLDLDTEFEILLPR.R | C[+57] | 903.442 | 4 | 3610.746 | 3610.747 | 0 | −0.2 | 4842 | 496.6 | 496.6 | 496.6 | 6.54 |
| 1720 | R.SLETNGEINLPKDYC[+57.021]STDLDLDTEFEILLPR.R | C[+57] | 1204.257 | 3 | 3610.757 | 3610.747 | 0 | 2.8 | 4842 | 542.9 | 395.5 | 395.5 | 5.91 |
| 3271 | R.SLETNGEIN[+0.984]LPKDYC[+57.021]STDLDLDTEFEI | C[+57], | 1204.581 | 3 | 3611.728 | 3611.731 | 0 | −0.8 | 4842 | 445.6 | 385.7 | 13.2 | 5.50 |
| | LLPR.R | N[+1] | | | | | | | | | | | |
| 4656 | R.SLETNGEIN[+0.984]LPKDY[+79.966]C[+57.021]STD | C[+57], | 924.176 | 4 | 3693.683 | 3691.697 | 2 | −5.6 | 4842 | 302.7 | 290.1 | 42.4 | 2.46 |
| | LDLDTEFEILLPR.R | N[+1], | | | | | | | | | | | |
| | | Y[+80] | | | | | | | | | | | |
| 1715 | R.GLGLC[+57.021]ATALVSYLIR.L | C[+57] | 536.305 | 3 | 1606.899 | 1606.899 | 0 | 0.5 | 4875 | 524.1 | 524.1 | 524.1 | 8.37 |
| 1819 | R.LHNEIVYAVEKLSK.E | | 411.485 | 4 | 1642.916 | 1642.916 | 0 | 0.1 | 4890 | 496.2 | 496.2 | 496.2 | 8.52 |
| 1819 | R.LHNEIVYAVEKLSK.E | | 548.310 | 3 | 1642.916 | 1642.916 | 0 | −0.4 | 4890 | 501.0 | 501.0 | 501.0 | 7.97 |
| 1246 | R.LHNEIVYAVEK.L | | 438.907 | 3 | 1314.705 | 1314.705 | 0 | −0.2 | 4890 | 449.9 | 449.9 | 449.9 | 7.80 |
| 1246 | R.LHNEIVYAVEK.L | | 438.907 | 3 | 1314.705 | 1314.705 | 0 | −0.2 | 4890 | 421.4 | 421.4 | 421.4 | 7.64 |
| 1246 | R.LHNEIVYAVEK.L | | 657.856 | 2 | 1314.705 | 1314.705 | 0 | −0.2 | 4890 | 372.9 | 372.9 | 372.9 | 7.53 |
| 4342 | R.ETVQEFDLEKIQR.Q | | 817.923 | 2 | 1634.838 | 1634.838 | 0 | −0.1 | 4946 | 603.2 | 603.2 | 603.2 | 10.32 |
| 1004 | R.LSLKGIPTLVYR.H | | 680.422 | 2 | 1359.836 | 1359.836 | 0 | 0.0 | 4971 | 681.3 | 681.3 | 681.3 | 11.32 |
| 1004 | R.LSLKGIPTLVYR.H | | 453.950 | 3 | 1359.836 | 1359.836 | 0 | 0.0 | 4971 | 553.5 | 553.5 | 553.5 | 8.65 |
| 1004 | R.LSLKGIPTLVYR.H | | 453.950 | 3 | 1359.836 | 1359.836 | 0 | −0.1 | 4971 | 473.5 | 473.5 | 473.5 | 7.76 |
| 1004 | R.LSLKGIPTLVYR.H | | 453.950 | 3 | 1359.836 | 1359.836 | 0 | 0.2 | 4971 | 467.1 | 467.1 | 467.1 | 7.76 |
| 1912 | K.GIPTLVYR.H | | 459.774 | 2 | 918.541 | 918.541 | 0 | 0.4 | 4975 | 347.3 | 347.3 | 347.3 | 5.86 |
| 966 | R.HDWNYEHLFMDIK.N | | 583.268 | 3 | 1747.790 | 1747.790 | 0 | 0.1 | 4983 | 576.6 | 576.6 | 576.6 | 9.03 |
| 966 | R.HDWNYEHLFMDIK.N | | 583.268 | 3 | 1747.790 | 1747.790 | 0 | 0.4 | 4983 | 557.4 | 557.4 | 557.4 | 8.91 |
| 2192 | R.HDWNYEHLFMDIKNK.M | | 498.237 | 4 | 1989.928 | 1989.928 | 0 | −0.1 | 4983 | 455.0 | 455.0 | 455.0 | 8.31 |
| 966 | R.HDWNYEHLFMDIK.N | | 583.268 | 3 | 1747.790 | 1747.790 | 0 | 0.2 | 4983 | 491.8 | 491.8 | 491.8 | 8.23 |
| 966 | R.HDWNYEHLFMDIK.N | | 874.399 | 2 | 1747.790 | 1747.790 | 0 | 0.0 | 4983 | 524.1 | 524.1 | 524.1 | 7.57 |
| 1565 | R.HDWNYEHLFM[+15.995]DIK.N | M[+16] | 588.600 | 3 | 1763.785 | 1763.785 | 0 | 0.0 | 4983 | 406.7 | 406.7 | 406.7 | 7.44 |
| 1611 | R.HDWNYEHLFM[+15.995]DIKNK.M | M[+16] | 502.236 | 4 | 2005.920 | 2005.923 | 0 | −1.1 | 4983 | 501.0 | 501.0 | 501.0 | 7.05 |
| 1020 | K.HTIALWQFLSAHKSEQLLR.L | | 570.317 | 4 | 2278.247 | 2278.246 | 0 | 0.5 | 5074 | 496.8 | 496.8 | 496.8 | 8.18 |
| 2095 | K.HTIALWQFLSAHK.S | | 517.953 | 3 | 1551.843 | 1551.843 | 0 | 0.1 | 5074 | 454.6 | 454.6 | 454.6 | 7.60 |
| 903 | R.LHKEPFGEISSR.Y | | 467.249 | 3 | 1399.733 | 1399.733 | 0 | 0.3 | 5093 | 598.9 | 598.9 | 598.9 | 9.32 |
| 903 | R.LHKEPFGEISSR.Y | | 467.250 | 3 | 1399.734 | 1399.733 | 0 | 0.7 | 5093 | 599.4 | 599.4 | 599.4 | 8.77 |
| 903 | R.LHKEPFGEISSR.Y | | 467.249 | 3 | 1399.733 | 1399.733 | 0 | 0.1 | 5093 | 576.0 | 576.0 | 576.0 | 8.77 |
| 903 | R.LHKEPFGEISSR.Y | | 467.249 | 3 | 1399.733 | 1399.733 | 0 | 0.2 | 5093 | 586.5 | 586.5 | 586.5 | 8.55 |
| 903 | R.LHKEPFGEISSR.Y | | 467.249 | 3 | 1399.733 | 1399.733 | 0 | −0.2 | 5093 | 555.9 | 555.9 | 555.9 | 8.10 |
| 903 | R.LHKEPFGEISSR.Y | | 467.249 | 3 | 1399.733 | 1399.733 | 0 | 0.2 | 5093 | 555.6 | 555.6 | 555.6 | 8.10 |
| 903 | R.LHKEPFGEISSR.Y | | 467.249 | 3 | 1399.733 | 1399.733 | 0 | 0.1 | 5093 | 483.1 | 483.1 | 483.1 | 7.97 |
| 903 | R.LHKEPFGEISSR.Y | | 467.249 | 3 | 1399.732 | 1399.733 | 0 | −0.4 | 5093 | 512.9 | 512.9 | 512.9 | 7.75 |
| 903 | R.LHKEPFGEISSR.Y | | 467.249 | 3 | 1399.734 | 1399.733 | 0 | 0.5 | 5093 | 402.3 | 402.3 | 402.3 | 7.38 |
| 903 | R.LHKEPFGEISSR.Y | | 467.249 | 3 | 1399.732 | 1399.733 | 0 | −0.3 | 5093 | 362.5 | 362.5 | 362.5 | 7.06 |
| 903 | R.LHKEPFGEISSR.Y | | 467.249 | 3 | 1399.734 | 1399.733 | 0 | 0.6 | 5093 | 346.6 | 346.6 | 346.6 | 5.98 |
| 903 | R.LHKEPFGEISSR.Y | | 700.370 | 2 | 1399.733 | 1399.733 | 0 | −0.3 | 5093 | 346.7 | 346.7 | 346.7 | 4.44 |
| 2609 | R.YKADLSPENAK.L | | 618.317 | 2 | 1235.627 | 1235.627 | 0 | 0.1 | 5105 | 467.8 | 467.8 | 467.8 | 7.54 |
| 3259 | K.LLSTFLNQTGLDAFLLELHEM[+15.995]IILK.L | M[+16] | 963.534 | 3 | 2888.587 | 2888.584 | 0 | 1.0 | 5116 | 821.8 | 821.8 | 821.8 | 14.78 |
| 3259 | K.LLSTFLNQTGLDAFLLELHEM[+15.995]IILK.L | M[+16] | 963.534 | 3 | 2888.587 | 2888.584 | 0 | 0.8 | 5116 | 781.8 | 781.8 | 781.8 | 13.79 |
| 3259 | K.LLSTFLNQTGLDAFLLELHEM[+15.995]IILK.L | M[+16] | 722.902 | 4 | 2888.584 | 2888.584 | 0 | 0.0 | 5116 | 790.4 | 790.4 | 790.4 | 13.25 |
| 1450 | K.LLSTFLNQTGLDAFLLELHEMIILK.L | | 958.202 | 3 | 2872.591 | 2872.589 | 0 | 0.4 | 5116 | 658.8 | 658.8 | 658.8 | 11.79 |
| 1450 | K.LLSTFLNQTGLDAFLLELHEMIILK.L | | 718.904 | 4 | 2872.593 | 2872.589 | 0 | 1.2 | 5116 | 673.6 | 673.6 | 673.6 | 11.25 |
| 3723 | K.LKNPQTQTEER.F | | 672.350 | 2 | 1343.692 | 1343.691 | 0 | 0.4 | 5141 | 408.7 | 408.7 | 408.7 | 7.18 |
| 3723 | K.LKNPQTQTEER.F | | 448.568 | 3 | 1343.691 | 1343.691 | 0 | −0.5 | 5141 | 370.3 | 370.3 | 370.3 | 6.35 |
| 1786 | R.FRPQWSLRDTLVSYMQTK.E | | 564.796 | 4 | 2256.160 | 2256.159 | 0 | 0.4 | 5152 | 391.1 | 391.1 | 391.1 | 7.27 |
| 2126 | R.FRPQWSLR.D | | 545.301 | 2 | 1089.595 | 1089.595 | 0 | −0.3 | 5152 | 398.0 | 398.0 | 398.0 | 7.14 |
| 861 | R.DTLVSYMQTK.E | | 593.295 | 2 | 1185.582 | 1185.582 | 0 | 0.2 | 5160 | 503.9 | 442.6 | 442.6 | 8.23 |
| 1540 | R.DTLVSYM[+15.995]QTK.E | M[+16] | 601.292 | 2 | 1201.577 | 1201.577 | 0 | 0.2 | 5160 | 491.8 | 491.8 | 491.8 | 8.23 |
| 861 | R.DTLVSYMQTK.E | | 593.295 | 2 | 1185.582 | 1185.582 | 0 | 0.1 | 5160 | 454.4 | 454.4 | 454.4 | 7.80 |
| 861 | R.DTLVSYMQTK.E | | 593.295 | 2 | 1185.582 | 1185.582 | 0 | 0.1 | 5160 | 379.5 | 379.5 | 379.5 | 7.53 |
| 861 | R.DTLVSYMQTK.E | | 593.294 | 2 | 1185.580 | 1185.582 | 0 | −1.9 | 5160 | 318.8 | 318.8 | 318.8 | 4.26 |
| 4036 | K.PIPNPLLGLDSTASKDNTVPLKLIALLANGEFHSGEQLGETLGM | | 963.716 | 5 | 4814.550 | 4814.540 | 0 | 2.1 | 5211 | 483.7 | 410.9 | 410.9 | 5.06 |
| | SR.A | | | | | | | | | | | | |
| 1144 | K.DNTVPLKLIALLANGEFHSGEQLGETLGMSR.A | | 1104.241 | 3 | 3310.710 | 3310.710 | 0 | −0.1 | 5226 | 822.4 | 822.4 | 822.4 | 13.85 |
| 1144 | K.DNTVPLKLIALLANGEFHSGEQLGETLGMSR.A | | 1104.240 | 3 | 3310.706 | 3310.710 | 0 | −1.2 | 5226 | 759.5 | 759.5 | 759.5 | 11.94 |
| 1144 | K.DNTVPLKLIALLANGEFHSGEQLGETLGMSR.A | | 828.433 | 4 | 3310.711 | 3310.710 | 0 | 0.4 | 5226 | 728.6 | 683.4 | 683.4 | 11.85 |
| 1144 | K.DNTVPLKLIALLANGEFHSGEQLGETLGMSR.A | | 828.433 | 4 | 3310.709 | 3310.710 | 0 | −0.4 | 5226 | 691.1 | 691.1 | 691.1 | 10.85 |
| 1144 | K.DNTVPLKLIALLANGEFHSGEQLGETLGMSR.A | | 1104.574 | 3 | 3311.706 | 3310.710 | 1 | −2.2 | 5226 | 670.7 | 670.7 | 68.7 | 9.94 |
| 1575 | K.DNTVPLKLIALLANGEFHSGEQLGETLGM[+15.995]SR.A | M[+16] | 832.432 | 4 | 3326.708 | 3326.705 | 0 | 0.8 | 5226 | 574.1 | 520.5 | 520.5 | 8.85 |
| 1144 | K.DNTVPLKLIALLANGEFHSGEQLGETLGMSR.A | | 662.948 | 5 | 3310.709 | 3310.710 | 0 | −0.4 | 5226 | 471.2 | 471.2 | 471.2 | 6.76 |
| 1144 | K.DNTVPLKLIALLANGEFHSGEQLGETLGMSR.A | | 662.947 | 5 | 3310.708 | 3310.710 | 0 | −0.7 | 5226 | 493.9 | 493.9 | 493.9 | 6.59 |
| 1144 | K.DNTVPLKLIALLANGEFHSGEQLGETLGMSR.A | | 662.948 | 5 | 3310.711 | 3310.710 | 0 | 0.2 | 5226 | 399.9 | 399.9 | 399.9 | 6.26 |
| 874 | K.LIALLANGEFHSGEQLGETLGMSR.A | | 848.436 | 3 | 2543.292 | 2543.292 | 0 | 0.0 | 5233 | 745.4 | 646.4 | 646.4 | 12.79 |
| 874 | K.LIALLANGEFHSGEQLGETLGMSR.A | | 848.435 | 3 | 2543.291 | 2543.292 | 0 | −0.7 | 5233 | 740.4 | 691.3 | 691.3 | 11.87 |
| 1515 | K.LIALLAN[+0.984]GEFHSGEQLGETLGMSR.A | N[+1] | 848.764 | 3 | 2544.277 | 2544.276 | 0 | 0.2 | 5233 | 662.7 | 582.4 | 282.5 | 11.79 |
| 874 | K.LIALLANGEFHSGEQLGETLGMSR.A | | 848.436 | 3 | 2543.293 | 2543.292 | 0 | 0.4 | 5233 | 637.7 | 515.1 | 515.1 | 10.79 |
| 1874 | K.LIALLANGEFHSGEQLGETLGMSR.A | | 848.436 | 3 | 2543.292 | 2543.292 | 0 | −0.2 | 5233 | 620.8 | 620.8 | 620.8 | 10.79 |
| 874 | K.LIALLANGEFHSGEQLGETLGMSR.A | | 848.436 | 3 | 2543.293 | 2543.292 | 0 | 0.1 | 5233 | 569.6 | 469.3 | 469.3 | 9.24 |
| 874 | K.LIALLANGEFHSGEQLGETLGMSR.A | | 636.579 | 4 | 2543.293 | 2543.292 | 0 | 0.5 | 5233 | 508.5 | 508.5 | 508.5 | 8.45 |
| 874 | K.LIALLANGEFHSGEQLGETLGMSR.A | | 636.579 | 4 | 2543.293 | 2543.292 | 0 | 0.5 | 5233 | 472.5 | 407.7 | 407.7 | 8.24 |
| 874 | K.LIALLANGEFHSGEQLGETLGMSR.A | | 848.435 | 3 | 2543.291 | 2543.292 | 0 | −0.5 | 5233 | 544.0 | 434.2 | 434.2 | 8.20 |
| 1515 | K.LIALLAN[+0.984]GEFHSGEQLGETLGMSR.A | N[+] | 848.763 | 3 | 2544.276 | 2544.276 | 0 | −0.2 | 5233 | 418.9 | 418.9 | 68.1 | 8.07 |
| 874 | K.LIALLANGEFHSGEQLGETLGMSR.A | | 848.436 | 3 | 2543.293 | 2543.292 | 0 | 0.1 | 5233 | 316.1 | 316.1 | 316.1 | 5.97 |
| 852 | R.AAINKHIQTLR.D | | 422.255 | 3 | 1264.749 | 1264.748 | 0 | 0.4 | 5257 | 499.7 | 499.7 | 499.7 | 8.52 |
| 852 | R.AAINKHIQTLR.D | | 422.254 | 3 | 1264.749 | 1264.748 | 0 | 0.1 | 5257 | 414.7 | 414.7 | 414.7 | 7.60 |
| 1796 | R.AAINKHIQTLRDWGVDVFTVPGK.G | | 642.104 | 4 | 2565.394 | 2565.394 | 0 | 0.3 | 5257 | 399.8 | 399.8 | 399.8 | 7.36 |
| 1796 | R.AAINKHIQTLRDWGVDVFTVPGK.G | | 642.104 | 4 | 2565.394 | 2565.394 | 0 | 0.0 | 5257 | 340.5 | 340.5 | 340.5 | 5.65 |
| 826 | K.HIQTLRDWGVDVFTVPGKGYSLPEPIPLLNAK.Q | | 890.987 | 4 | 3560.927 | 3560.926 | 0 | 0.1 | 5262 | 627.4 | 627.4 | 627.4 | 9.52 |
| 826 | K.HIQTLRDWGVDVFTVPGKGYSLPEPIPLLNAK.Q | | 712.991 | 5 | 3560.926 | 3560.926 | 0 | −0.2 | 5262 | 462.1 | 462.1 | 462.1 | 7.51 |
| 826 | K.HIQTLRDWGVDVFTVPGKGYSLPEPIPLLNAK.Q | | 890.988 | 4 | 3560.929 | 3560.926 | 0 | 0.7 | 5262 | 520.3 | 520.3 | 520.3 | 7.30 |
| 1810 | K.HIQTLRDWGVDVFTVPGK.G | | 690.037 | 3 | 2068.098 | 2068.097 | 0 | 0.2 | 5262 | 372.4 | 372.4 | 372.4 | 7.27 |
| 826 | K.HIQTLRDWGVDVFTVPGKGYSLPEPIPLLNAK.Q | | 1187.648 | 3 | 3560.931 | 3560.926 | 0 | 1.2 | 5262 | 585.5 | 585.5 | 585.5 | 7.17 |
| 826 | K.HIQTLRDWGVDVFTVPGKGYSLPEPIPLLNAK.Q | | 712.991 | 5 | 3560.927 | 3560.926 | 0 | 0.3 | 5262 | 431.7 | 431.7 | 431.7 | 6.79 |
| 3102 | K.HIQTLRDWGVDVFTVPGKGYSLPEPIPLLN[+0.984]AK.Q | IN[+1] | 713.189 | 5 | 3561.913 | 3561.910 | 0 | 0.8 | 5262 | 407.1 | 407.1 | 199.3 | 6.57 |
| 826 | K.HIQTLRDWGVDVFTVPGKGYSLPEPIPLLNAK.Q | | 712.991 | 5 | 3560.926 | 3560.926 | 0 | 0.0 | 5262 | 353.9 | 353.9 | 353.9 | 4.79 |
| 1810 | K.HIQTLRDWGVDVFTVPGK.G | | 1034.552 | 2 | 2068.097 | 2068.097 | 0 | −0.1 | 5262 | 325.5 | 325.5 | 325.5 | 4.64 |
| 826 | K.HIQTLRDWGVDVFTVPGKGYSLPEPIPLLNAK.Q | | 594.327 | 6 | 3560.927 | 3560.926 | 0 | 0.2 | 5262 | 324.8 | 324.8 | 324.8 | 4.63 |
| 1109 | R.DWGVDVFTVPGKGYSLPEPIPLLNAK.Q | | 938.169 | 3 | 2812.492 | 2812.492 | 0 | 0.1 | 5268 | 863.5 | 863.5 | 863.5 | 15.48 |
| 1510 | R.DWGVDVFTVPGKGYSLPEPIPLLN[+0.984]AK.Q | N[+1] | 938.498 | 3 | 2813.479 | 2813.476 | 0 | 1.2 | 5268 | 825.8 | 825.8 | 592.9 | 14.54 |
| 1109 | R.DWGVDVFTVPGKGYSLPEPIPLLNAK.Q | | 938.170 | 3 | 2812.496 | 2812.492 | 0 | 1.3 | 5268 | 793.5 | 793.5 | 793.5 | 13.53 |
| 1109 | R.DWGVDVFTVPGKGYSLPEPIPLLNAK.Q | | 1406.752 | 2 | 2812.497 | 2812.492 | 0 | 1.6 | 5268 | 703.7 | 703.7 | 703.7 | 12.53 |
| 1510 | R.DWGVDVFTVPGKGYSLPEPIPLLN[+0.984]AK.Q | N[+1] | 938.497 | 3 | 2813.478 | 2813.476 | 0 | 0.6 | 5268 | 698.1 | 698.1 | 322.3 | 11.53 |
| 1109 | R.DWGVDVFTVPGKGYSLPEPIPLLNAK.Q | | 938.169 | 3 | 2812.493 | 2812.492 | 0 | 0.3 | 5268 | 665.8 | 665.8 | 665.8 | 11.53 |
| 931 | R.DWGVDVFTVPGK.G | | 660.335 | 2 | 1319.663 | 1319.663 | 0 | 0.2 | 5268 | 521.0 | 521.0 | 521.0 | 8.91 |
| 931 | R.DWGVDVFTVPGK.G | | 660.336 | 2 | 1319.665 | 1319.663 | 0 | 1.3 | 5268 | 521.4 | 521.4 | 521.4 | 8.36 |
| 1109 | R.DWGVDVFTVPGKGYSLPEPIPLLNAK.Q | | 703.879 | 4 | 2812.494 | 2812.492 | 0 | 0.7 | 5268 | 548.3 | 548.3 | 548.3 | 8.32 |
| 931 | R.DWGVDVFTVPGK.G | | 660.336 | 2 | 1319.664 | 1319.663 | 0 | 0.5 | 5268 | 390.9 | 390.9 | 390.9 | 7.53 |
| 931 | R.DWGVDVFTVPGK.G | | 440.559 | 3 | 1319.663 | 1319.663 | 0 | 0.2 | 5268 | 377.6 | 377.6 | 377.6 | 6.60 |
| 950 | K.GYSLPEPIPLLNAK.Q | | 756.427 | 2 | 1511.846 | 1511.847 | 0 | −0.3 | 5280 | 664.7 | 664.7 | 664.7 | 11.58 |
| 950 | K.GYSLPEPIPLLNAK.Q | | 504.620 | 3 | 1511.846 | 1511.847 | 0 | −0.4 | 5280 | 595.2 | 595.2 | 595.2 | 9.04 |
| 950 | K.GYSLPEPIPLLNAK.Q | | 756.427 | 2 | 1511.847 | 1511.847 | 0 | −0.1 | 5280 | 534.9 | 534.9 | 534.9 | 8.91 |
| 950 | K.GYSLPEPIPLLNAK.Q | | 756.427 | 2 | 1511.846 | 1511.847 | 0 | −0.4 | 5280 | 473.9 | 473.9 | 473.9 | 8.57 |
| 950 | K.GYSLPEPIPLLNAK.Q | | 756.427 | 2 | 1511.846 | 1511.847 | 0 | 0.3 | 5280 | 440.5 | 440.5 | 440.5 | 8.57 |
| 950 | K.GYSLPEPIPLLNAK.Q | | 756.427 | 2 | 1511.847 | 1511.847 | 0 | −0.1 | 5280 | 406.2 | 406.2 | 406.2 | 8.41 |
| 950 | K.GYSLPEPIPLLNAK.Q | | 756.427 | 2 | 1511.847 | 1511.847 | 0 | 0.1 | 5280 | 395.9 | 395.9 | 395.9 | 7.75 |
| 950 | K.GYSLPEPIPLLNAK.Q | | 504.620 | 3 | 1511.844 | 1511.847 | 0 | −1.6 | 5280 | 518.9 | 518.9 | 518.9 | 7.32 |
| 950 | K.GYSLPEPIPLLNAK.Q | | 756.427 | 2 | 1511.846 | 1511.847 | 0 | −0.5 | 5280 | 412.0 | 412.0 | 412.0 | 6.94 |
| 3127 | K.QILGQLDGGSVAVLPVVDSTN[+0.984]QYLLDRIGELK.S | N[+1] | 1137.953 | 3 | 3411.845 | 3411.837 | 0 | 2.4 | 5294 | 949.6 | 949.6 | 502.2 | 14.56 |
| 964 | K.QILGQLDGGSVAVLPVVDSTNQYLLDRIGELK.S | | 1137.626 | 3 | 3410.863 | 3410.853 | 0 | 2.9 | 5294 | 911.3 | 911.3 | 911.3 | 14.56 |
| 964 | K.QILGQLDGGSVAVLPVVDSTNQYLLDRIGELK.S | | 853.469 | 4 | 3410.856 | 3410.853 | 0 | 0.8 | 5294 | 847.0 | 847.0 | 847.0 | 13.32 |
| 964 | K.QILGQLDGGSVAVLPVVDSTNQYLLDRIGELK.S | | 682.977 | 5 | 3410.856 | 3410.853 | 0 | 0.8 | 5294 | 811.5 | 811.5 | 811.5 | 13.32 |
| 893 | K.QILGQLDGGSVAVLPVVDSTNQYLLDR.I | | 1435.766 | 2 | 2870.525 | 2870.526 | 0 | −0.4 | 5294 | 757.5 | 757.5 | 757.5 | 12.88 |
| 964 | K.QILGQLDGGSVAVLPVVDSTNQYLLDRIGELK.S | | 1137.623 | 3 | 3410.855 | 3410.853 | 0 | 0.6 | 5294 | 765.1 | 765.1 | 765.1 | 12.85 |
| 893 | K.QILGQLDGGSVAVLPVVDSTNQYLLDR.I | | 1435.768 | 2 | 2870.529 | 2870.526 | 0 | 0.9 | 5294 | 720.4 | 720.4 | 720.4 | 12.79 |
| 893 | K.QILGQLDGGSVAVLPVVDSTNQYLLDR.I | | 1435.769 | 2 | 2870.530 | 2870.526 | 0 | 1.4 | 5294 | 692.0 | 692.0 | 692.0 | 11.79 |
| 893 | K.QILGQLDGGSVAVLPVVDSTNQYLLDR.I | | 1435.771 | 2 | 2870.534 | 2870.526 | 0 | 2.8 | 5294 | 702.1 | 702.1 | 702.1 | 11.49 |
| 3127 | K.QILGQLDGGSVAVLPVVDSTN[+0.984]QYLLDRIGELK.S | N[+1] | 853.716 | 4 | 3411.841 | 3411.837 | 0 | 1.1 | 5294 | 711.6 | 711.6 | 310.7 | 11.32 |
| 964 | K.QILGQLDGGSVAVLPVVDSTNQYLLDRIGELK.S | | 853.470 | 4 | 3410.859 | 3410.853 | 0 | 1.9 | 5294 | 776.9 | 776.9 | 776.9 | 11.02 |
| 893 | K.QILGQLDGGSVAVLPVVDSTNQYLLDR.I | | 1435.769 | 2 | 2870.531 | 2870.526 | 0 | 1.7 | 5294 | 664.7 | 664.7 | 664.7 | 10.49 |
| 893 | K.QILGQLDGGSVAVLPVVDSTNQYLLDR.I | | 957.513 | 3 | 2870.525 | 2870.526 | 0 | −0.4 | 5294 | 664.6 | 664.6 | 664.6 | 10.34 |
| 893 | K.QILGQLDGGSVAVLPVVDSTNQYLLDR.I | | 957.514 | 3 | 2870.526 | 2870.526 | 0 | 0.1 | 5294 | 625.5 | 625.5 | 625.5 | 10.25 |
| 893 | K.QILGQLDGGSVAVLPVVDSTNQYLLDR.I | | 718.387 | 4 | 2870.526 | 2870.526 | 0 | 0.0 | 5294 | 603.2 | 603.2 | 603.2 | 10.25 |
| 1505 | K.QILGQLDGGSVAVLPVVDSTN[+0.984]QYLLDR.I | N[+1] | 1436.261 | 2 | 2871.515 | 2871.510 | 0 | 1.6 | 5294 | 607.0 | 607.0 | 85.3 | 9.49 |
| 893 | K.QILGQLDGGSVAVLPVVDSTNQYLLDR.I | | 957.513 | 3 | 2870.524 | 2870.526 | 0 | −0.6 | 5294 | 613.8 | 613.8 | 613.8 | 9.34 |
| 893 | K.QILGQLDGGSVAVLPVVDSTNQYLLDR.I | | 718.388 | 4 | 2870.529 | 2870.526 | 0 | 1.0 | 5294 | 576.8 | 576.8 | 576.8 | 9.25 |
| 893 | K.QILGQLDGGSVAVLPVVDSTNQYLLDR.I | | 1435.767 | 2 | 2870.526 | 2870.526 | 0 | 0.2 | 5294 | 559.7 | 559.7 | 559.7 | 9.12 |
| 893 | K.QILGQLDGGSVAVLPVVDSTNQYLLDR.I | | 957.514 | 3 | 2870.526 | 2870.526 | 0 | 0.0 | 5294 | 539.3 | 539.3 | 539.3 | 8.58 |
| 1505 | K.QILGQLDGGSVAVLPVVDSTN[+0.984]QYLLDR.I | N[+1] | 957.842 | 3 | 2871.512 | 2871.510 | 0 | 0.7 | 5294 | 529.6 | 529.6 | 235.0 | 8.58 |
| 893 | K.QILGQLDGGSVAVLPVVDSTNQYLLDR.I | | 718.387 | 4 | 2870.528 | 2870.526 | 0 | 0.7 | 5294 | 505.5 | 505.5 | 505.5 | 8.45 |
| 893 | K.QILGQLDGGSVAVLPVVDSTNQYLLDR.I | | 718.388 | 4 | 2870.530 | 2870.526 | 0 | 1.5 | 5294 | 499.7 | 499.7 | 499.7 | 8.45 |
| 893 | K.QILGQLDGGSVAVLPVVDSTNQYLLDR.I | | 957.515 | 3 | 2870.531 | 2870.526 | 0 | 1.7 | 5294 | 493.6 | 493.6 | 493.6 | 7.90 |
| 1505 | K.QILGQLDGGSVAVLPVVDSTN[+0.984]QYLLDR.I | N[+1] | 957.842 | 3 | 2871.512 | 2871.510 | 0 | 0.9 | 5294 | 550.8 | 550.8 | 110.9 | 7.81 |
| 1505 | K.QILGQLDGGSVAVLPVVDSTN[+0.984]QYLLDR.I | N[+1] | 957.842 | 3 | 2871.511 | 2871.510 | 0 | 0.5 | 5294 | 455.9 | 455.9 | 164.8 | 7.47 |
| 893 | K.QILGQLDGGSVAVLPVVDSTNQYLLDR.I | | 957.514 | 3 | 2870.526 | 2870.526 | 0 | 0.0 | 5294 | 368.5 | 368.5 | 368.5 | 7.42 |
| 893 | K.QILGQLDGGSVAVLPVVDSTNQYLLDR.I | | 957.516 | 3 | 2870.534 | 2870.526 | 0 | 2.8 | 5294 | 541.0 | 541.0 | 541.0 | 7.28 |
| 893 | K.QILGQLDGGSVAVLPVVDSTNQYLLDR.I | | 957.514 | 3 | 2870.527 | 2870.526 | 0 | 0.5 | 5294 | 371.1 | 371.1 | 371.1 | 6.99 |
| 3326 | K.QILGQLDGGSVAVLPVVDSTNQYLLDRIGELKSGDAC | C[+57] | 984.308 | 5 | 4917.512 | 4917.505 | 0 | 1.5 | 5294 | 406.9 | 406.9 | 406.9 | 5.45 |
| | [+57.021]IAEYQQAGR.G | | | | | | | | | | | | |
| 964 | K.QILGQLDGGSVAVLPVVDSTNQYLLDRIGELK.S | | 1137.614 | 3 | 3410.826 | 3410.853 | 0 | −7.9 | 5294 | 459.2 | 459.2 | 459.2 | 5.38 |
| 3326 | K.QILGQLDGGSVAVLPVVDSTNQYLLDRIGELKSGDAC | C[+57] | 984.310 | 5 | 4917.518 | 4917.505 | 0 | 2.7 | 5294 | 571.9 | 571.9 | 571.9 | 5.32 |
| | [+57.021]IAEYQQAGR.G | | | | | | | | | | | | |
| 893 | K.QILGQLDGGSVAVLPVVDSTNQYLLDR.I | | 957.513 | 3 | 2870.525 | 2870.526 | 0 | −0.4 | 5294 | 307.4 | 307.4 | 307.4 | 4.72 |
| 3326 | K.QILGQLDGGSVAVLPVVDSTNQYLLDRIGELKSGDAC | C[+57] | 984.309 | 5 | 4917.515 | 4917.505 | 0 | 1.9 | 5294 | 413.7 | 413.7 | 413.7 | 4.15 |
| | [+57.021]IAEYQQAGR.G | | | | | | | | | | | | |
| 893 | K.QILGQLDGGSVAVLPVVDSTNQYLLDR.I | | 957.856 | 3 | 2871.553 | 2870.526 | 1 | 8.1 | 5294 | 311.5 | 187.2 | 187.2 | 2.99 |
| 964 | K.QILGQLDGGSVAVLPVVDSTNQYLLDRIGELK.S | | 853.462 | 4 | 3410.824 | 3410.853 | 0 | −8.4 | 5294 | 322.6 | 322.6 | 322.6 | 2.82 |
| 1692 | R.IGELKSGDAC[+57.021]IAEYQQAGR.G | C[+57] | 689.337 | 3 | 2065.998 | 2065.997 | 0 | 0.2 | 5321 | 455.5 | 455.5 | 455.5 | 7.97 |
| 1698 | K.SGDAC[+57.021]IAEYQQAGR.G | C[+57] | 763.338 | 2 | 1525.670 | 1525.670 | 0 | −0.3 | 5326 | 596.6 | 596.6 | 596.6 | 9.58 |
| 1711 | K.SGDAC[+57.021]IAEYQQAGRGSR.G | C[+57] | 609.280 | 3 | 1825.825 | 1825.825 | 0 | 0.1 | 5326 | 537.5 | 537.5 | 537.5 | 8.31 |
| 1698 | K.SGDAC[+57.021]IAEYQQAGR.G | C[+57] | 509.228 | 3 | 1525.669 | 1525.670 | 0 | −0.4 | 5326 | 482.5 | 473.5 | 473.5 | 7.69 |
| 1698 | K.SGDAC[+57.021]IAEYQQAGR.G | C[+57] | 509.228 | 3 | 1525.669 | 1525.670 | 0 | −0.4 | 5326 | 338.1 | 338.1 | 338.1 | 5.32 |
| 4362 | K.RGPAAIGLGPVIGIVMAEALRK.L | | 548.330 | 4 | 2190.299 | 2189.295 | 1 | 0.2 | 5364 | 611.1 | 611.1 | 611.1 | 10.53 |
| 822 | K.RGPAAIGLGPVIGIVMAEALR.K | | 687.739 | 3 | 2061.201 | 2061.200 | 0 | 0.5 | 5364 | 519.7 | 519.7 | 519.7 | 8.98 |
| 2620 | R.GPAAIGLGPVIGIVMAEALR.K | | 953.054 | 2 | 1905.101 | 1905.099 | 0 | 1.2 | 5365 | 605.8 | 605.8 | 605.8 | 10.79 |
| 912 | R.VKWPNDLYLQDR.K | | 516.272 | 3 | 1546.801 | 1546.801 | 0 | 0.1 | 5393 | 535.5 | 462.3 | 462.3 | 8.10 |
| 912 | R.VKWPNDLYLQDR.K | | 516.272 | 3 | 1546.802 | 1546.801 | 0 | 0.2 | 5393 | 537.9 | 537.9 | 537.9 | 7.88 |
| 912 | R.VKWPNDLYLQDR.K | | 516.272 | 3 | 1546.801 | 1546.801 | 0 | 0.1 | 5393 | 467.5 | 419.2 | 419.2 | 7.76 |
| 919 | R.VKWPNDLYLQDRK.L | | 558.970 | 3 | 1674.896 | 1674.896 | 0 | −0.2 | 5393 | 495.4 | 495.4 | 495.4 | 7.63 |
| 912 | R.VKWPNDLYLQDR.K | | 773.905 | 2 | 1546.802 | 1546.801 | 0 | 0.5 | 5393 | 370.4 | 370.4 | 370.4 | 7.06 |
| 919 | R.VKWPNDLYLQDRK.L | | 558.970 | 3 | 1674.896 | 1674.896 | 0 | −0.2 | 5393 | 412.5 | 397.5 | 397.5 | 6.84 |
| 919 | R.VKWPNDLYLQDRK.L | | 419.480 | 4 | 1674.896 | 1674.896 | 0 | 0.0 | 5393 | 391.5 | 391.5 | 391.5 | 6.73 |
| 919 | R.VKWPNDLYLQDRK.L | | 558.970 | 3 | 1674.895 | 1674.896 | 0 | −0.5 | 5393 | 483.4 | 483.4 | 483.4 | 6.49 |
| 912 | R.VKWPNDLYLQDR.K | | 773.905 | 2 | 1546.802 | 1546.801 | 0 | 0.5 | 5393 | 320.1 | 320.1 | 320.1 | 5.78 |
| 2303 | K.WPNDLYLQDR.K | | 660.322 | 2 | 1319.637 | 1319.638 | 0 | 0.4 | 5395 | 418.8 | 270.4 | 270.4 | 5.97 |
| 857 | R.RVEESVVNQGWITLQEAGINLDRNTLAATLIR.E | | 716.791 | 5 | 3579.925 | 3579.924 | 0 | 0.1 | 5435 | 883.0 | 754.2 | 754.2 | 14.31 |
| 857 | R.RVEESVVNQGWITLQEAGINLDRNTLAATLIR.E | | 895.737 | 4 | 3579.926 | 3579.924 | 0 | 0.5 | 5435 | 846.8 | 846.8 | 846.8 | 13.85 |
| 857 | R.RVEESVVNQGWITLQEAGINLDRNTLAATLIR.E | | 895.737 | 4 | 3579.925 | 3579.924 | 0 | 0.3 | 5435 | 806.2 | 766.0 | 766.0 | 13.85 |
| 857 | R.RVEESVVNQGWITLQEAGINLDRNTLAATLIR.E | | 716.791 | 5 | 3579.926 | 3579.924 | 0 | 0.4 | 5435 | 801.3 | 659.9 | 659.9 | 13.32 |
| 857 | R.RVEESVVNQGWITLQEAGINLDRNTLAATLIR.E | | 895.737 | 4 | 3579.926 | 3579.924 | 0 | 0.4 | 5435 | 744.9 | 720.6 | 720.6 | 11.85 |
| 857 | R.RVEESVVNQGWITLQEAGINLDRNTLAATLIR.E | | 895.737 | 4 | 3579.927 | 3579.924 | 0 | 0.7 | 5435 | 716.9 | 625.8 | 625.8 | 11.85 |
| 1857 | R.RVEESVVNQGWITLQEAGINLDRNTLAATLIR.E | | 1193.980 | 3 | 3579.925 | 3579.924 | 0 | 0.3 | 5435 | 710.2 | 710.2 | 710.2 | 11.85 |
| 857 | R.RVEESVVNQGWITLQEAGINLDRNTLAATLIR.E | | 895.737 | 4 | 3579.926 | 3579.924 | 0 | 0.4 | 5435 | 669.4 | 669.4 | 669.4 | 10.85 |
| 1067 | R.RVEESVVNQGWITLQEAGINLDR.N | | 876.125 | 3 | 2626.360 | 2626.358 | 0 | 0.6 | 5435 | 621.6 | 621.6 | 621.6 | 10.24 |
| 857 | R.RVEESVVNQGWITLQEAGINLDRNTLAATLIR.E | | 895.737 | 4 | 3579.926 | 3579.924 | 0 | 0.4 | 5435 | 594.4 | 519.4 | 519.4 | 8.85 |
| 1067 | R.RVEESVVNQGWITLQEAGINLDR.N | | 876.125 | 3 | 2626.359 | 2626.358 | 0 | 0.3 | 5435 | 551.6 | 551.6 | 551.6 | 8.35 |
| 1292 | R.VEESVVNQGWITLQEAGINLDRNTLAATLIR.E | | 856.711 | 4 | 3423.822 | 3423.823 | 0 | −0.4 | 5436 | 828.5 | 828.5 | 828.5 | 13.32 |
| 1292 | R.VEESVVNQGWITLQEAGINLDRNTLAATLIR.E | | 1141.947 | 3 | 3423.826 | 3423.823 | 0 | 0.7 | 5436 | 701.7 | 701.7 | 701.7 | 11.85 |
| 1292 | R.VEESVVNQGWITLQEAGINLDRNTLAATLIR.E | | 857.213 | 4 | 3425.831 | 3423.823 | 2 | 0.4 | 5436 | 655.9 | 655.9 | 95.9 | 10.32 |
| 1292 | R.VEESVVNQGWITLQEAGINLDRNTLAATLIR.E | | 685.571 | 5 | 3423.827 | 3423.823 | 0 | 1.1 | 5436 | 594.4 | 550.5 | 550.5 | 8.32 |
| 4657 | R.VEES[+79.966]VVN[+0.984]QGWITLQEAGINLDRNT | N[+1], | 1328.994 | 3 | 3984.967 | 3982.968 | 2 | −1.9 | 5436 | 312.2 | 312.2 | 1.0 | 3.20 |
| | [+79.966]LAATLIRELR.A | S[+80], | | | | | | | | | | | |
| | | T[+80] | | | | | | | | | | | |
| 1032 | R.AALELFEQEGLAPYLPRWEK.L | | 787.415 | 3 | 2360.231 | 2360.229 | 0 | 0.9 | 5470 | 719.5 | 719.5 | 719.5 | 12.53 |
| 1032 | R.AALELFEQEGLAPYLPRWEK.L | | 787.416 | 3 | 2360.232 | 2360.229 | 0 | 1.6 | 5470 | 643.9 | 643.9 | 643.9 | 10.53 |
| 1032 | R.AALELFEQEGLAPYLPRWEK.L | | 590.813 | 4 | 2360.229 | 2360.229 | 0 | 0.0 | 5470 | 576.4 | 576.4 | 576.4 | 8.99 |
| 1914 | R.AALELFEQEGLAPYLPR.W | | 959.010 | 2 | 1917.012 | 1917.012 | 0 | 0.4 | 5470 | 452.6 | 452.6 | 452.6 | 8.78 |
| 1914 | R.AALELFEQEGLAPYLPR.W | | 959.011 | 2 | 1917.015 | 1917.012 | 0 | 2.0 | 5470 | 455.8 | 455.8 | 455.8 | 6.93 |
| 1032 | R.AALELFEQEGLAPYLPRWEK.L | | 1181.120 | 2 | 2361.233 | 2360.229 | 1 | 0.4 | 5470 | 368.8 | 304.8 | 304.8 | 5.92 |
| 973 | R.WEKLDNFINRPVK.L | | 553.639 | 3 | 1658.901 | 1658.901 | 0 | 0.1 | 5487 | 540.5 | 540.5 | 540.5 | 8.10 |
| 973 | R.WEKLDNFINRPVK.L | | 415.481 | 4 | 1658.901 | 1658.901 | 0 | −0.2 | 5487 | 400.2 | 400.2 | 400.2 | 7.18 |
| 973 | R.WEKLDNFINRPVK.L | | 829.954 | 2 | 1658.901 | 1658.901 | 0 | −0.1 | 5487 | 332.6 | 332.6 | 332.6 | 4.25 |
| 820 | K.LDNFINRPVKLIIGDKEIFGISR.G | | 665.134 | 4 | 2657.516 | 2657.514 | 0 | 0.8 | 5490 | 465.4 | 465.4 | 465.4 | 7.63 |
| 820 | K.LDNFINRPVKLIIGDKEIFGISR.G | | 532.309 | 5 | 2657.514 | 2657.514 | 0 | 0.1 | 5490 | 444.6 | 444.6 | 444.6 | 7.63 |
| 1931 | K.LDNFINRPVK.L | | 608.346 | 2 | 1215.684 | 1215.684 | 0 | 0.0 | 5490 | 459.0 | 459.0 | 459.0 | 7.60 |
| 820 | K.LDNFINRPVKLIIGDKEIFGISR.G | | 665.134 | 4 | 2657.515 | 2657.514 | 0 | 0.5 | 5490 | 472.0 | 472.0 | 472.0 | 7.41 |
| 1931 | K.LDNFINRPVK.L | | 405.900 | 3 | 1215.684 | 1215.684 | 0 | 0.0 | 5490 | 397.2 | 397.2 | 397.2 | 7.14 |
| 1931 | K.LDNFINRPVK.L | | 405.900 | 3 | 1215.684 | 1215.684 | 0 | −0.1 | 5490 | 347.7 | 347.7 | 347.7 | 6.04 |
| 1931 | K.LDNFINRPVK.L | | 405.900 | 3 | 1215.684 | 1215.684 | 0 | −0.1 | 5490 | 335.1 | 335.1 | 335.1 | 5.86 |
| 820 | K.LDNFINRPVKLIIGDKEIFGISR.G | | 665.134 | 4 | 2657.513 | 2657.514 | 0 | 0.3 | 5490 | 305.6 | 305.6 | 305.6 | 4.92 |
| 983 | K.LIIGDKEIFGISR.G | | 487.621 | 3 | 1460.847 | 1460.847 | 0 | −0.2 | 5500 | 660.5 | 660.5 | 660.5 | 11.32 |
| 983 | K.LIIGDKEIFGISR.G | | 487.621 | 3 | 1460.848 | 1460.847 | 0 | 0.3 | 5500 | 597.8 | 597.8 | 597.8 | 9.32 |
| 983 | K.LIIGDKEIFGISR.G | | 487.621 | 3 | 1460.847 | 1460.847 | 0 | −0.1 | 5500 | 562.7 | 562.7 | 562.7 | 9.32 |
| 983 | K.LIIGDKEIFGISR.G | | 730.927 | 2 | 1460.847 | 1460.847 | 0 | 0.1 | 5500 | 554.2 | 554.2 | 554.2 | 8.65 |
| 983 | K.LIIGDKEIFGISR.G | | 487.621 | 3 | 1460.847 | 1460.847 | 0 | 0.0 | 5500 | 397.0 | 397.0 | 397.0 | 7.27 |
| 983 | K.LIIGDKEIFGISR.G | | 487.955 | 3 | 1461.850 | 1460.847 | 1 | −0.2 | 5500 | 344.2 | 344.2 | 344.2 | 4.00 |
| 1612 | R.GIDKQGALLLEQDGVIKPWM[+15.995]GGEISLR.S | M[+16] | 980.527 | 3 | 2939.568 | 2939.566 | 0 | 0.6 | 5513 | 825.1 | 825.1 | 825.1 | 14.54 |
| 837 | R.GIDKQGALLLEQDGVIKPWMGGEISLR.S | | 975.196 | 3 | 2923.573 | 2923.571 | 0 | 0.6 | 5513 | 819.7 | 819.7 | 819.7 | 14.54 |
| 837 | R.GIDKQGALLLEQDGVIKPWMGGEISLR.S | | 975.196 | 3 | 2923.573 | 2923.571 | 0 | 0.6 | 5513 | 798.6 | 798.6 | 798.6 | 13.53 |
| 837 | R.GIDKQGALLLEQDGVIKPWMGGEISLR.S | | 731.648 | 4 | 2923.572 | 2923.571 | 0 | 0.2 | 5513 | 767.7 | 767.7 | 767.7 | 13.53 |
| 837 | R.GIDKQGALLLEQDGVIKPWMGGEISLR.S | | 731.649 | 4 | 2923.573 | 2923.571 | 0 | 0.5 | 5513 | 755.5 | 755.5 | 755.5 | 13.53 |
| 1837 | R.GIDKQGALLLEQDGVIKPWMGGEISLR.S | | 975.195 | 3 | 2923.570 | 2923.571 | 0 | −0.3 | 5513 | 733.7 | 733.7 | 733.7 | 12.53 |
| 1612 | R.GIDKQGALLLEQDGVIKPWM[+15.995]GGEISLR.S | M[+16] | 980.528 | 3 | 2939.569 | 2939.566 | 0 | 1.1 | 5513 | 719.2 | 719.2 | 719.2 | 12.53 |
| 837 | R.GIDKQGALLLEQDGVIKPWMGGEISLR.S | | 731.648 | 4 | 2923.570 | 2923.571 | 0 | −0.2 | 5513 | 706.1 | 706.1 | 706.1 | 12.53 |
| 837 | R.GIDKQGALLLEQDGVIKPWMGGEISLR.S | | 731.648 | 4 | 2923.570 | 2923.571 | 0 | −0.2 | 5513 | 681.9 | 681.9 | 681.9 | 11.53 |
| 837 | R.GIDKQGALLLEQDGVIKPWMGGEISLR.S | | 731.649 | 4 | 2923.573 | 2923.571 | 0 | 0.5 | 5513 | 674.7 | 674.7 | 674.7 | 11.53 |
| 1837 | R.GIDKQGALLLEQDGVIKPWMGGEISLR.S | | 731.649 | 4 | 2923.572 | 2923.571 | 0 | 0.4 | 5513 | 674.2 | 674.2 | 674.2 | 11.53 |
| 837 | R.GIDKQGALLLEQDGVIKPWMGGEISLR.S | | 975.195 | 3 | 2923.571 | 2923.571 | 0 | 0.0 | 5513 | 671.2 | 671.2 | 671.2 | 11.53 |
| 837 | R.GIDKQGALLLEQDGVIKPWMGGEISLR.S | | 731.649 | 4 | 2923.573 | 2923.571 | 0 | 0.6 | 5513 | 669.7 | 669.7 | 669.7 | 11.53 |
| 837 | R.GIDKQGALLLEQDGVIKPWMGGEISLR.S | | 585.520 | 5 | 2923.571 | 2923.571 | 0 | −0.1 | 5513 | 694.1 | 694.1 | 694.1 | 10.99 |
| 837 | R.GIDKQGALLLEQDGVIKPWMGGEISLR.S | | 731.649 | 4 | 2923.572 | 2923.571 | 0 | 0.3 | 5513 | 641.0 | 641.0 | 641.0 | 10.53 |
| 1612 | R.GIDKQGALLLEQDGVIKPWM[+15.995]GGEISLR.S | M[+16] | 735.648 | 4 | 2939.569 | 2939.566 | 0 | 1.1 | 5513 | 626.1 | 626.1 | 626.1 | 10.53 |
| 837 | R.GIDKQGALLLEQDGVIKPWMGGEISLR.S | | 731.649 | 4 | 2923.573 | 2923.571 | 0 | 0.6 | 5513 | 623.6 | 623.6 | 623.6 | 10.53 |
| 837 | R.GIDKQGALLLEQDGVIKPWMGGEISLR.S | | 975.195 | 3 | 2923.569 | 2923.571 | 0 | −0.6 | 5513 | 629.8 | 629.8 | 629.8 | 9.61 |
| 837 | R.GIDKQGALLLEQDGVIKPWMGGEISLR.S | | 731.649 | 4 | 2923.572 | 2923.571 | 0 | 0.4 | 5513 | 590.0 | 590.0 | 590.0 | 9.53 |
| 1837 | R.GIDKQGALLLEQDGVIKPWMGGEISLR.S | | 731.648 | 4 | 2923.571 | 2923.571 | 0 | 0.1 | 5513 | 583.7 | 583.7 | 583.7 | 9.53 |
| 837 | R.GIDKQGALLLEQDGVIKPWMGGEISLR.S | | 731.648 | 4 | 2923.572 | 2923.571 | 0 | 0.3 | 5513 | 577.2 | 577.2 | 577.2 | 9.53 |
| 1612 | R.GIDKQGALLLEQDGVIKPWM[+15.995]GGEISLR.S | M[+16] | 735.648 | 4 | 2939.569 | 2939.566 | 0 | 1.0 | 5513 | 576.9 | 576.9 | 576.9 | 9.53 |
| 837 | R.GIDKQGALLLEQDGVIKPWMGGEISLR.S | | 731.649 | 4 | 2923.572 | 2923.571 | 0 | 0.3 | 5513 | 569.1 | 569.1 | 569.1 | 8.98 |
| 1612 | R.GIDKQGALLLEQDGVIKPWM[+15.995]GGEISLR.S | M[+16] | 735.898 | 4 | 2940.570 | 2939.566 | 1 | 0.2 | 5513 | 537.3 | 537.3 | 537.3 | 8.86 |
| 837 | R.GIDKQGALLLEQDGVIKPWMGGEISLR.S | | 731.649 | 4 | 2923.574 | 2923.571 | 0 | 1.0 | 5513 | 532.6 | 532.6 | 532.6 | 8.86 |
| 837 | R.GIDKQGALLLEQDGVIKPWMGGEISLR.S | | 731.648 | 4 | 2923.572 | 2923.571 | 0 | 0.3 | 5513 | 525.4 | 525.4 | 525.4 | 8.86 |
| 837 | R.GIDKQGALLLEQDGVIKPWMGGEISLR.S | | 731.648 | 4 | 2923.572 | 2923.571 | 0 | 0.3 | 5513 | 499.4 | 499.4 | 499.4 | 8.72 |
| 1612 | R.GIDKQGALLLEQDGVIKPWM[+15.995]GGEISLR.S | M[+16] | 735.647 | 4 | 2939.568 | 2939.566 | 0 | 0.6 | 5513 | 1494.4 | 494.4 | 494.4 | 8.72 |
| 1612 | R.GIDKQGALLLEQDGVIKPWM[+15.995]GGEISLR.S | M[+16] | 980.527 | 3 | 2939.567 | 2939.566 | 0 | 0.4 | 5513 | 530.5 | 530.5 | 530.5 | 8.31 |
| 837 | R.GIDKQGALLLEQDGVIKPWMGGEISLR.S | | 975.195 | 3 | 2923.571 | 2923.571 | 0 | 0.0 | 5513 | 491.8 | 491.8 | 491.8 | 7.75 |
| 837 | R.GIDKQGALLLEQDGVIKPWMGGEISLR.S | | 731.648 | 4 | 2923.572 | 2923.571 | 0 | 0.3 | 5513 | 399.6 | 399.6 | 399.6 | 7.70 |
| 1612 | R.GIDKQGALLLEQDGVIKPWM[+15.995]GGEISLR.S | M[+16] | 980.528 | 3 | 2939.569 | 2939.566 | 0 | 1.1 | 5513 | 462.1 | 462.1 | 462.1 | 7.55 |
| 837 | R.GIDKQGALLLEQDGVIKPWMGGEISLR.S | | 731.648 | 4 | 2923.572 | 2923.571 | 0 | 0.3 | 5513 | 390.2 | 390.2 | 390.2 | 7.47 |
| 1612 | R.GIDKQGALLLEQDGVIKPWM[+15.995]GGEISLR.S | M[+16] | 981.195 | 3 | 2941.572 | 2939.566 | 2 | −0.3 | 5513 | 413.7 | 413.7 | 413.7 | 7.39 |
| 837 | R.GIDKQGALLLEQDGVIKPWMGGEISLR.S | | 731.649 | 4 | 2923.573 | 2923.571 | 0 | 0.6 | 5513 | 401.5 | 401.5 | 401.5 | 7.39 |
| 837 | R.GIDKQGALLLEQDGVIKPWMGGEISLR.S | | 731.649 | 4 | 2923.572 | 2923.571 | 0 | 0.4 | 5513 | 348.0 | 348.0 | 348.0 | 5.99 |
| 837 | R.GIDKQGALLLEQDGVIKPWMGGEISLR.S | | 731.900 | 4 | 2924.579 | 2923.571 | 1 | 1.7 | 5513 | 391.8 | 391.8 | 391.8 | 5.79 |
| 837 | R.GIDKQGALLLEQDGVIKPWMGGEISLR.S | | 731.648 | 4 | 2923.571 | 2923.571 | 0 | 0.1 | 5513 | 307.9 | 307.9 | 307.9 | 5.71 |
| 837 | R.GIDKQGALLLEQDGVIKPWMGGEISLR.S | | 731.649 | 4 | 2923.575 | 2923.571 | 0 | 1.3 | 5513 | 312.4 | 312.4 | 312.4 | 5.53 |
| 837 | R.GIDKQGALLLEQDGVIKPWMGGEISLR.S | | 731.649 | 4 | 2923.573 | 2923.571 | 0 | 0.7 | 5513 | 304.0 | 304.0 | 304.0 | 5.53 |
| 837 | R.GIDKQGALLLEQDGVIKPWMGGEISLR.S | | 585.520 | 5 | 2923.569 | 2923.571 | 0 | −0.8 | 5513 | 320.0 | 320.0 | 320.0 | 4.35 |
| 915 | K.QGALLLEQDGVIKPWMGGEISLR.S | | 628.341 | 4 | 2510.343 | 2510.344 | 0 | −0.1 | 5517 | 666.9 | 666.9 | 666.9 | 11.25 |
| 915 | K.QGALLLEQDGVIKPWMGGEISLR.S | | 837.453 | 3 | 2510.344 | 2510.344 | 0 | 0.2 | 5517 | 600.7 | 600.7 | 600.7 | 10.79 |
| 1659 | K.QGALLLEQDGVIKPWM[+15.995]GGEISLR.S | M[+16] | 842.784 | 3 | 2526.337 | 2526.339 | 0 | −0.5 | 5517 | 643.7 | 643.7 | 643.7 | 9.87 |
| 915 | K.QGALLLEQDGVIKPWMGGEISLR.S | | 1255.675 | 2 | 2510.342 | 2510.344 | 0 | −0.6 | 5517 | 643.1 | 643.1 | 643.1 | 9.87 |
| 1659 | K.QGALLLEQDGVIKPWM[+15.995]GGEISLR.S | M[+16] | 842.783 | 3 | 2526.335 | 2526.339 | 0 | −1.3 | 5517 | 577.7 | 577.7 | 577.7 | 8.33 |
| 864 | R.SAEKLQLPPLER.L | | 690.896 | 2 | 1380.784 | 1380.785 | 0 | −0.1 | 5540 | 646.0 | 646.0 | 646.0 | 10.32 |
| 864 | R.SAEKLQLPPLER.L | | 690.896 | 2 | 1380.784 | 1380.785 | 0 | −0.2 | 5540 | 572.9 | 572.9 | 572.9 | 9.32 |
| 864 | R.SAEKLQLPPLER.L | | 690.896 | 2 | 1380.784 | 1380.785 | 0 | −0.2 | 5540 | 561.2 | 561.2 | 561.2 | 8.77 |
| 864 | R.SAEKLQLPPLER.L | | 690.896 | 2 | 1380.784 | 1380.785 | 0 | −0.1 | 5540 | 555.2 | 555.2 | 555.2 | 8.65 |
| 864 | R.SAEKLQLPPLER.L | | 460.933 | 3 | 1380.785 | 1380.785 | 0 | 0.1 | 5540 | 441.7 | 441.7 | 441.7 | 7.76 |
| 864 | R.SAEKLQLPPLER.L | | 460.933 | 3 | 1380.784 | 1380.785 | 0 | −0.2 | 5540 | 480.0 | 480.0 | 480.0 | 7.54 |
| 864 | R.SAEKLQLPPLER.L | | 690.896 | 2 | 1380.784 | 1380.785 | 0 | −0.1 | 5540 | 399.9 | 399.9 | 399.9 | 7.27 |
| 4650 | R.SAEKLQLPPLERLTLD.- | | 912.017 | 2 | 1823.027 | 1823.027 | 0 | 0.1 | 5540 | 431.4 | 431.4 | 431.4 | 7.26 |
| 864 | R.SAEKLQLPPLER.L | | 460.933 | 3 | 1380.784 | 1380.785 | 0 | −0.7 | 5540 | 531.2 | 531.2 | 531.2 | 7.19 |
| 864 | R.SAEKLQLPPLER.L | | 460.933 | 3 | 1380.785 | 1380.785 | 0 | 0.0 | 5540 | 364.7 | 364.7 | 364.7 | 7.06 |
| 864 | R.SAEKLQLPPLER.L | | 460.933 | 3 | 1380.785 | 1380.785 | 0 | 0.0 | 5540 | 335.5 | 335.5 | 335.5 | 5.78 |
| 864 | R.SAEKLQLPPLER.L | | 460.933 | 3 | 1380.784 | 1380.785 | 0 | −0.3 | 5540 | 329.0 | 329.0 | 329.0 | 5.78 |
| 1905 | K.LQLPPLER.L | | 483.292 | 2 | 965.578 | 965.578 | 0 | −0.3 | 5544 | 429.6 | 429.6 | 429.6 | 7.44 |
| 1905 | K.LQLPPLER.L | | 483.293 | 2 | 965.578 | 965.578 | 0 | −0.2 | 5544 | 371.2 | 371.2 | 371.2 | 7.32 |
| 1905 | K.LQLPPLER.L | | 483.293 | 2 | 965.578 | 965.578 | 0 | 0.0 | 5544 | 370.4 | 370.4 | 370.4 | 7.14 |
| 1905 | K.LQLPPLER.L | | 483.293 | 2 | 965.578 | 965.578 | 0 | 0.1 | 5544 | 361.1 | 361.1 | 361.1 | 7.14 |
| 4651 | K.LQLPPLERLTLD.- | | 704.414 | 2 | 1407.820 | 1407.821 | 0 | −0.2 | 5544 | 346.6 | 346.6 | 346.6 | 5.98 |
| 1905 | K.LQLPPLER.L | | 483.293 | 2 | 965.578 | 965.578 | 0 | 0.3 | 5544 | 319.3 | 319.3 | 319.3 | 5.58 |

TABLE 10
Unique in N-Turbo vs. Control and C-Turbo vs. Control

| | | Avg | Avg | Avg | Avg % | Avg % |
|---|---|---|---|---|---|---|
| | | PSMs | PSMs | PSMs in | Sequence | Sequence |
| | | in C- | in N- | Control | Coverage | Coverage |
| Accession | Description | Turbo | Turbo | Turbo | C-Turbo | N-Turbo |
| Q14119 | Vascular endothelial zinc finger 1 OS = Homo sapiens OX = 9606 GN = VEZF1 PE = 1 SV = 2-[VEZF1_HUMAN] | 0 | 4 | 0 | 0.0 | 4.9 |
| Q16850-2 | Isoform 2 of Lanosterol 14-alpha demethylase OS = Homo sapiens OX=9606 GN=CYP51A1 - [CP51A_HUMAN] | 3 | 4 | 0 | 5.9 | 7.8 |
| O96013 | Serine/threonine-protein kinase PAK 4 OS = Homo sapiens OX = 9606 GN = PAK4 PE = 1 | 1 | 4 | 0 | 1.6 | 4.7 |
| | SV = 1 - [PAK4_HUMAN] | | | | | |
| O15269 | Serine palmitoyltransferase 1 OS = Homo sapiens OX = 9606 GN = SPTLC1 PE = 1 SV = 1 - [SPTC1_HUMAN] | 3 | 3 | 0 | 6.7 | 7.8 |
| Q08AE8-2 | Isoform 2 of Protein spire homolog 1 OS = Homo sapiens OX = 9606 GN = SPIRE1 - [SPIR1_HUMAN] | 3 | 3 | 0 | 3.0 | 3.0 |
| Q86SQ0-2 | Isoform 2 of Pleckstrin homology-like domain family B member 2 OS = Homo sapiens OX = 9606 GN = | 2 | 3 | 0 | 1.5 | 3.1 |
| | PHLDB2 - [PHLB2_HUMAN] | | | | | |
| Q969X6-2 | Isoform 2 of U3 small nucleolar RNA-associated protein 4 homolog OS=Homo sapiens OX = 9606 | 0 | 3 | 0 | 0.0 | 8.1 |
| | GN = UTP4 - [UTP4_HUMAN] | | | | | |
| Q02750-2 | Isoform 2 of Dual specificity mitogen-activated protein kinase kinase 1 OS = Homo sapiens | 2 | 3 | 0 | 6.3 | 14.7 |
| | OX = 9606 GN = MAP2K1 - [MP2K1_HUMAN] | | | | | |
| ASYKK6 | CCR4-NOT transcription complex subunit 1 OS = Homo sapiens OX = 9606 GN = CNOT1 PE = 1 | 1 | 3 | 0 | 0.5 | 1.9 |
| | SV = 2 - [CNOT1_HUMAN] | | | | | |
| Q15773 | Myeloid leukemia factor 2 OS = Homo sapiens OX = 9606 GN = MLF2 PE = 1 SV = 1 - [MLF2_HUMAN] | 0 | 3 | 0 | 0.0 | 15.7 |
| Q99755-3 | Isoform 3 of Phosphatidylinositol 4-phosphate 5-kinase type-1 alpha OS = Homo sapiens OX = | 0 | 3 | 0 | 0.0 | 8.6 |
| | 9606 GN = PIP5K1A - [PI51A_HUMAN] | | | | | |
| Q9NQC7-2 | Isoform 2 of Ubiquitin carboxyl-terminal hydrolase CYLD OS = Homo sapiens OX = 9606 GN = | 8 | 2 | 0 | 9.2 | 3.1 |
| | CYLD - [CYLD_HUMAN] | | | | | |
| Q13045-2 | Isoform 2 of Protein flightless-1 homolog OS = Homo sapiens OX = 9606 GN = FLII - [FLII_HUMAN] | 4 | 2 | 0 | 3.6 | 2.2 |
| Q96CB8 | Integrator complex subunit 12 OS = Homo sapiens OX = 9606 GN = INTS12 PE = 1 SV = 1 - [INT12_HUMAN] | 1 | 2 | 0 | 1.8 | 5.2 |
| P22061 | Protein-L-isoaspartate(D-aspartate) O-methyltransferase OS = Homo sapiens OX = 9606 GN = | 2 | 2 | 0 | 16.6 | 8.7 |
| | PCMT1 PE = 1 SV = 4 - [PIMT_HUMAN] | | | | | |
| O75477 | Erlin-1 OS = Homo sapiens OX = 9606 GN = ERLIN1 PE = 1 SV = 2 - [ERLN1_HUMAN] | 2 | 2 | 0 | 6.3 | 9.5 |
| Q15154-4 | Isoform 4 of Pericentriolar material 1 protein OS = Homo sapiens OX = 9606 GN = PCM1 - [PCM1_HUMAN] | 1 | 2 | 0 | 0.3 | 1.3 |
| P30533 | Alpha-2-macroglobulin receptor-associated protein OS = Homo sapiens OX = 9606 GN = LRPAP1 PE = | 0 | 2 | 0 | 0.0 | 8.3 |
| | 1 SV = 1 - [AMRP_HUMAN] | | | | | |
| Q6P1L5 | Protein FAM117B OS = Homo sapiens OX = 9606 GN = FAM117B PE = 1 SV = 2 - [F117B_HUMAN] | 0 | 2 | 0 | 0.0 | 3.2 |
| Q6XZF7 | Dynamin-binding protein OS = Homo sapiens OX = 9606 GN = DNMBP PE = 1 SV = 1 - [DNMBP_HUMAN] | 0 | 2 | 0 | 0.0 | 1.5 |
| Q7Z5Q1-7 | Isoform 6 of Cytoplasmic polyadenylation element-binding protein 2 OS = Homo sapiens OX = 9606 | 0 | 2 | 0 | 0.0 | 4.0 |
| | GN = CPEB2 - [CPEB2_HUMAN] | | | | | |
| Q9UHD2 | Serine/threonine-protein kinase TBK1 OS = Homo sapiens OX = 9606 GN = TBK1 PE = 1 SV = | 2 | 2 | 0 | 5.5 | 2.8 |
| | 1 - [TBK1_HUMAN] | | | | | |
| A6NED2 | RCC1 domain-containing protein 1 OS = Homo sapiens OX = 9606 GN = RCCD1 PE = 1 SV = | 2 | 2 | 0 | 7.6 | 9.3 |
| | 1 - [RCCD1_HUMAN] | | | | | |
| Q99456 | Keratin, type I cytoskeletal 12 OS = Homo sapiens OX = 9606 GN = KRT12 PE = 1 SV = | 1 | 2 | 0 | 1.2 | 1.8 |
| | 1 - [K1C12_HUMAN] | | | | | |
| O60716-21 | Isoform 3A of Catenin delta-1 OS = Homo sapiens OX = 9606 GN = CTNND1 - [CTND1_HUMAN] | 1 | 2 | 0 | 2.0 | 3.6 |
| Q8NB46 | Serine/threonine-protein phosphatase 6 regulatory ankyrin repeat subunit C OS = Homo sapiens | 1 | 2 | 0 | 1.5 | 2.2 |
| | OX = 9606 GN = ANKRD52 PE = 1 SV = 3 - [ANR52_HUMAN] | | | | | |
| P06789 | Replication protein E1 OS = Human papillomavirus type 18 OX = 333761 GN = E1 PE = 1 SV = | 1 | 2 | 0 | 1.6 | 2.2 |
| | 1 - [VE1_HPV18] | | | | | |
| P62857 | 40S ribosomal protein S28 OS = Homo sapiens OX = 9606 GN = RPS28 PE = 1 SV = 1 - [RS28_HUMAN] | 1 | 2 | 0 | 7.7 | 24.2 |
| P31751-2 | Isoform 2 of RAC-beta serine/threonine-protein kinase OS = Homo sapiens OX = 9606 GN = | 0 | 2 | 0 | 0.0 | 3.5 |
| | AKT2 - [AKT2_HUMAN] | | | | | |
| P82650 | 28S ribosomal protein S22, mitochondrial OS = Homo sapiens OX = 9606 GN = MRPS22 PE = 1 SV = | 0 | 2 | 0 | 0.0 | 8.0 |
| | 1 - [RT22_HUMAN] | | | | | |
| Q13131 | 5′-AMP-activated protein kinase catalytic subunit alpha-1 OS = Homo sapiens OX = 9606 GN = | 0 | 2 | 0 | 0.0 | 3.5 |
| | PRKAA1 PE = 1 SV = 4 - [AAPK1_HUMAN] | | | | | |
| Q92616 | elF-2-alpha kinase activator GCN1 OS = Homo sapiens OX = 9606 GN = GCN1 PE = 1 SV = | 0 | 2 | 0 | 0.0 | 0.9 |
| | 6 - [GCN1_HUMAN] | | | | | |
| Q92625 | Ankyrin repeat and SAM domain-containing protein 1A OS = Homo sapiens OX = 9606 GN = | 0 | 2 | 0 | 0.0 | 2.7 |
| | ANKS1A PE = 1 SV = 4 - [ANS1A_HUMAN] | | | | | |
| Q9HD45 | Transmembrane 9 superfamily member 3 OS = Homo sapiens OX = 9606 GN = TM9SF3 PE = 1 SV = | 0 | 2 | 0 | 0.0 | 2.6 |
| | 2 - [TM9S3_HUMAN] | | | | | |
| Q9UGR2 | Zinc finger CCCH domain-containing protein 7B OS = Homo sapiens OX = 9606 GN = ZC3H7B PE = | 0 | 2 | 0 | 0.0 | 1.2 |
| | 1 SV = 2 - [Z3H7B_HUMAN] | | | | | |
| Q9H0W8-2 | Isoform 2 of Protein SMG9 OS = Homo sapiens OX = 9606 GN = SMG9 - [SMG9_HUMAN] | 1 | 1 | 0 | 2.3 | 5.7 |
| O14925 | Mitochondrial import inner membrane translocase subunit Tim23 OS = Homo sapiens OX = | 1 | 1 | 0 | 4.5 | 8.6 |
| | 9606 GN = TIMM23 PE = 1 SV = 1 - [TIM23_HUMAN] | | | | | |
| P02662 | CRAP CASA1_BOVIN Alpha-S1-casein OS = Bos taurus GN = CSN1S1 PE = 1 SV = 2 | 1 | 1 | 0 | 3.4 | 6.9 |
| P08574 | Cytochrome c1, heme protein, mitochondrial OS = Homo sapiens OX = 9606 GN = CYC1 PE = | 1 | 1 | 0 | 2.9 | 5.7 |
| | 1 SV = 3 - [CY1_HUMAN] | | | | | |
| P16989-2 | Isoform 2 of Y-box-binding protein 3 OS = Homo sapiens OX = 9606 GN = YBX3 - [YBOX3_HUMAN] | 1 | 1 | 0 | 5.3 | 5.3 |
| P45973 | Chromobox protein homolog 5 OS = Homo sapiens OX = 9606 GN = CBX5 PE = 1 SV = 1 - [CBX5_HUMAN] | 1 | 1 | 0 | 3.3 | 6.8 |
| P78312-4 | Isoform 4 of Protein FAM193A OS = Homo sapiens OX = 9606 GN = FAM193A - [F193A_HUMAN] | 1 | 1 | 0 | 1.0 | 2.7 |
| Q7Z4G4-3 | Isoform 3 of tRNA (guanine(10)-N2)-methyltransferase homolog OS = Homo sapiens OX = 9606 | 1 | 1 | 0 | 1.7 | 4.8 |
| | GN = TRMT11 - [TRM11_HUMAN] | | | | | |
| O60493-4 | Isoform 4 of Sorting nexin-3 OS = Homo sapiens OX = 9606 GN = SNX3 - [SNX3_HUMAN] | 0 | 1 | 0 | 0.0 | 13.1 |
| O75128 | Protein cordon-bleu OS = Homo sapiens OX = 9606 GN = COBL PE = 1 SV = 2 - [COBL_HUMAN] | 0 | 1 | 0 | 0.0 | 1.5 |
| P14373-2 | Isoform Beta of Zinc finger protein RFP OS = Homo sapiens OX = 9606 GN = | 0 | 1 | 0 | 0.0 | 6.0 |
| | TRIM27 - [TRI27_HUMAN] | | | | | |
| P14635-2 | Isoform 2 of G2/mitotic-specific cyclin-B1 OS = Homo sapiens OX = 9606 GN = | 0 | 1 | 0 | 0.0 | 4.7 |
| | CCNB1 - [CCNB1_HUMAN] | | | | | |
| Q15155 | Nodal modulator 1 OS = Homo sapiens OX = 9606 GN = NOMO1 PE = 1 SV = 5 - [NOMO1_HUMAN] | 0 | 1 | 0 | 0.0 | 1.7 |
| Q6SJ93-2 | Isoform 2 of Protein FAM111B OS = Homo sapiens OX = 9606 GN = FAM111B - [F111B_HUMAN] | 0 | 1 | 0 | 0.0 | 1.9 |
| Q7Z739 | YTH domain-containing family protein 3 OS = Homo sapiens OX = 9606 GN = YTHDF3 PE = | 0 | 1 | 0 | 0.0 | 2.2 |
| | 1 SV = 1 - [YTHD3_HUMAN] | | | | | |
| Q8NI08-2 | Isoform 2 of Nuclear receptor coactivator 7 OS = Homo sapiens OX = 9606 GN = | 0 | 1 | 0 | 0.0 | 0.9 |
| | NCOA7 - [NCOA7_HUMAN] | | | | | |
| Q99755-4 | Isoform 4 of Phosphatidylinositol 4-phosphate 5-kinase type-1 alpha OS = Homo sapiens | 0 | 1 | 0 | 0.0 | 4.4 |
| | OX = 9606 GN = PIP5K1A - [PI51A_HUMAN] | | | | | |
| Q9BSH4 | Translational activator of cytochrome c oxidase 1 OS = Homo sapiens OX = 9606 GN = | 0 | 1 | 0 | 0.0 | 7.6 |
| | TACO1 PE = 1 SV = 1 - [TACO1_HUMAN] | | | | | |
| Q9NX74 | tRNA-dihydrouridine(20) synthase [NAD(P)+]-like OS = Homo sapiens OX = 9606 GN = DUS2 | 0 | 1 | 0 | 0.0 | 3.0 |
| | PE = 1 SV = 1 - [DUS2L_HUMAN] | | | | | |
| Q9UI30 | Multifunctional methyltransferase subunit TRM112-like protein OS = Homo sapiens | 0 | 1 | 0 | 0.0 | 14.9 |
| | OX = 9606 GN = TRMT112 PE = 1 SV = 1 - [TR112_HUMAN] | | | | | |
| Q9UN86-2 | Isoform B of Ras GTPase-activating protein-binding protein 2 OS = Homo sapiens OX = | 0 | 1 | 0 | 0.0 | 6.1 |
| | 9606 GN = G3BP2 - [G3BP2_HUMAN] | | | | | |
| Q9Y232-3 | Isoform 3 of Chromodomain Y-like protein OS = Homo sapiens OX = 9606 GN = | 0 | 1 | 0 | 0.0 | 4.7 |
| | CDYL - [CDYL_HUMAN] | | | | | |
| Q9Y3P9 | Rab GTPase-activating protein 1 OS = Homo sapiens OX = 9606 GN = RABGAP1 PE = 1 | 0 | 1 | 0 | 0.0 | 1.9 |
| | SV = 3 - [RBGP1_HUMAN] | | | | | |
| Q9Y6B6 | GTP-binding protein SAR1b OS = Homo sapiens OX = 9606 GN = SAR1B PE = 1 SV = | 0 | 1 | 0 | 0.0 | 6.4 |
| | 1 - [SAR1B_HUMAN] | | | | | |
| Q9NZM1-2 | Isoform 2 of Myoferlin OS = Homo sapiens OX = 9606 GN = MYOF - [MYOF_HUMAN] | 3 | 1 | 0 | 2.4 | 0.8 |
| O95391 | Pre-mRNA-splicing factor SLU7 OS = Homo sapiens OX = 9606 GN = SLU7 PE = 1 SV = | 1 | 1 | 0 | 2.0 | 3.5 |
| | 2 - [SLU7_HUMAN] | | | | | |
| Q15208 | Serine/threonine-protein kinase 38 OS = Homo sapiens OX = 9606 GN = STK38 PE = 1 | 1 | 1 | 0 | 2.0 | 2.8 |
| | SV = 1 - [STK38_HUMAN] | | | | | |
| Q6IN84 | rRNA methyltransferase 1, mitochondrial OS = Homo sapiens OX = 9606 GN = MRM1 PE = 1 | 1 | 1 | 0 | 3.4 | 3.4 |
| | SV = 1 - [MRM1_HUMAN] | | | | | |
| Q96SU4-5 | Isoform 5 of Oxysterol-binding protein-related protein 9 OS = Homo sapiens OX = 9606 | 1 | 1 | 0 | 1.4 | 1.4 |
| | GN = OSBPL9 - [OSBL9_HUMAN] | | | | | |
| Q9NX46 | ADP-ribose glycohydrolase ARH3 OS = Homo sapiens OX = 9606 GN = ADPRHL2 PE = 1 | 1 | 1 | 0 | 2.1 | 3.4 |
| | SV = 1 - [ARHL2_HUMAN] | | | | | |
| O60547-2 | Isoform 2 of GDP-mannose 4,6 dehydratase OS = Homo sapiens OX = 9606 GN = | 0 | 1 | 0 | 0.0 | 2.6 |
| | GMDS - [GMDS_HUMAN] | | | | | |
| P09001 | 39S ribosomal protein L3, mitochondrial OS = Homo sapiens OX = 9606 GN = MRPL3 PE = 1 | 0 | 1 | 0 | 0.0 | 3.9 |
| | SV = 1 - [RM03_HUMAN] | | | | | |
| P20618 | Proteasome subunit beta type-1 OS = Homo sapiens OX = 9606 GN = PSMB1 PE = | 0 | 1 | 0 | 0.0 | 5.5 |
| | 1 SV = 2 - [PSB1_HUMAN] | | | | | |
| P98082-3 | Isoform 3 of Disabled homolog 2 OS = Homo sapiens OX = 9606 GN = DAB2 - [DAB2_HUMAN] | 0 | 1 | 0 | 0.0 | 2.0 |
| Q00537 | Cyclin-dependent kinase 17 OS = Homo sapiens OX = 9606 GN = CDK17 PE = 1 SV = | 0 | 1 | 0 | 0.0 | 1.0 |
| | 2 - [CDK17_HUMAN] | | | | | |
| Q04323 | UBX domain-containing protein 1 OS = Homo sapiens OX = 9606 GN = UBXN1 PE = 1 SV = | 0 | 1 | 0 | 0.0 | 7.5 |
| | 2 - [UBXN1_HUMAN] | | | | | |
| Q12899 | Tripartite motif-containing protein 26 OS = Homo sapiens OX = 9606 GN = TRIM26 PE = | 0 | 1 | 0 | 0.0 | 2.3 |
| | 1 SV = 1 - [TRI26_HUMAN] | | | | | |
| Q13057 | Bifunctional coenzyme A synthase OS = Homo sapiens OX = 9606 GN = COASY PE = 1 SV = | 0 | 1 | 0 | 0.0 | 2.0 |
| | 4 - [COASY_HUMAN] | | | | | |
| Q13126-4 | Isoform 4 of S-methyl-5′-thioadenosine phosphorylase OS = Homo sapiens OX = 9606 GN = | 0 | 1 | 0 | 0.0 | 4.9 |
| | MTAP - [MTAP_HUMAN] | | | | | |
| Q13564-3 | Isoform 3 of NEDD8-activating enzyme E1 regulatory subunit OS = Homo sapiens OX = | 0 | 1 | 0 | 0.0 | 2.9 |
| | 9606 GN = NAE1 - [ULA1_HUMAN] | | | | | |
| Q7L099-2 | Isoform 2 of Protein RUFY3 OS = Homo sapiens OX = 9606 GN = RUFY3 - [RUFY3_HUMAN] | 0 | 1 | 0 | 0.0 | 2.3 |
| Q9NRG9-2 | Isoform 2 of Aladin OS = Homo sapiens OX = 9606 GN = AAAS - [AAAS_HUMAN] | 0 | 1 | 0 | 0.0 | 2.8 |
| Q9ULV3-5 | Isoform 5 of Cip1-interacting zinc finger protein OS = Homo sapiens OX = 9606 GN = | 0 | 1 | 0 | 0.0 | 1.3 |
| | CIZ1 - [CIZ1_HUMAN] | | | | | |
| Q9Y6C9 | Mitochondrial carrier homolog 2 OS = Homo sapiens OX = 9606 GN = MTCH2 PE = 1 SV = | 0 | 1 | 0 | 0.0 | 3.3 |
| | 1 - [MTCH2_HUMAN] | | | | | |
| O95819-4 | Isoform 4 of Mitogen-activated protein kinase kinase kinase kinase 4 OS = Homo sapiens | 4 | 1 | 0 | 4.3 | 1.1 |
| | OX = 9606 GN = MAP4K4 - [M4K4_HUMAN] | | | | | |
| Q96A49 | Synapse-associated protein 1 OS = Homo sapiens OX = 9606 GN = SYAP1 PE = 1 SV = | 3 | 1 | 0 | 9.5 | 2.4 |
| | 1 - [SYAP1_HUMAN] | | | | | |
| Q9NP81 | Serine -- tRNA ligase, mitochondrial OS = Homo sapiens OX = 9606 GN = SARS2 PE = 1 | 3 | 1 | 0 | 8.5 | 2.1 |
| | SV = 1 - [SYSM_HUMAN] | | | | | |
| O75794 | Cell division cycle protein 123 homolog OS = Homo sapiens OX = 9606 GN = CDC123 PE = 1 | 2 | 1 | 0 | 7.4 | 1.7 |
| | SV = 1 - [CD123_HUMAN] | | | | | |
| P50747 | Biotin -- protein ligase OS = Homo sapiens OX = 9606 GN = HLCS PE = 1 SV = 1 - [BPL1_HUMAN] | 2 | 1 | 0 | 2.7 | 1.2 |
| Q2M218-2 | Isoform 2 of AP2-associated protein kinase 1 OS = Homo sapiens OX = 9606 GN = | 2 | 1 | 0 | 4.9 | 2.5 |
| | AAK1 - [AAK1_HUMAN] | | | | | |
| P57737-3 | Isoform 3 of Coronin-7 OS = Homo sapiens OX = 9606 GN = CORO7 - [CORO7_HUMAN] | 2 | 1 | 0 | 2.7 | 1.1 |
| Q86YZ3 | Hornerin OS = Homo sapiens OX = 9606 GN = HRNR PE = 1 SV = 2 - [HORN_HUMAN] | 2 | 1 | 0 | 1.3 | 0.8 |
| Q96IR7 | 4-hydroxyphenylpyruvate dioxygenase-like protein OS = Homo sapiens OX = 9606 GN = HPDL | 2 | 1 | 0 | 7.7 | 3.3 |
| | PE = 1 SV = 1 - [HPDL_HUMAN] | | | | | |
| P31350 | Ribonucleoside-diphosphate reductase subunit M2 OS = Homo sapiens OX = 9606 GN = RRM2 | 1 | 1 | 0 | 5.2 | 2.7 |
| | PE = 1 SV = 1 - [RIR2_HUMAN] | | | | | |
| P51114-3 | Isoform 3 of Fragile X mental retardation syndrome-related protein 1 OS = Homo sapiens | 1 | 1 | 0 | 6.0 | 3.0 |
| | OX = 9606 GN = FXR1 - [FXR1_HUMAN] | | | | | |
| Q53EP0 | Fibronectin type Ill domain-containing protein 3B OS = Homo sapiens OX = 9606 GN = | 1 | 1 | 0 | 1.8 | 1.0 |
| | FNDC3B PE = 1 SV = 2 - [FND3B_HUMAN] | | | | | |
| Q92888-2 | Isoform 2 of Rho guanine nucleotide exchange factor 1 OS = Homo sapiens OX = 9606 GN = | 1 | 1 | 0 | 1.8 | 1.1 |
| | ARHGEF1 - [ARHG1_HUMAN] | | | | | |
| Q96A35 | 39S ribosomal protein L24, mitochondrial OS = Homo sapiens OX = 9606 GN = MRPL24 PE = | 1 | 1 | 0 | 11.4 | 5.7 |
| | 1 SV = 1 - [RM24_HUMAN] | | | | | |
| Q96T60 | Bifunctional polynucleotide phosphatase/kinase OS = Homo sapiens OX = 9606 GN = PNKP PE = | 1 | 1 | 0 | 4.5 | 2.3 |
| | 1 SV = 1 - [PNKP_HUMAN] | | | | | |
| Q9H992-2 | Isoform 2 of E3 ubiquitin-protein ligase MARCH7 OS = Homo sapiens OX = 9606 GN = | 1 | 1 | 0 | 2.4 | 1.8 |
| | MARCH7 - [MARH7_HUMAN] | | | | | |
| P18074-2 | Isoform 2 of General transcription and DNA repair factor IIH helicase subunit XPD OS = | 1 | 1 | 0 | 3.3 | 3.3 |
| | Homo sapiens OX = 9606 GN = ERCC2 - [ERCC2_HUMAN] | | | | | |
| P60228 | Eukaryotic translation initiation factor 3 subunit E OS = Homo sapiens OX = 9606 GN = | 1 | 1 | 0 | 2.2 | 2.2 |
| | EIF3E PE = 1 SV = 1 - [EIF3E_HUMAN] | | | | | |
| Q9BQL6 | Fermitin family homolog 1 OS = Homo sapiens OX = 9606 GN = FERMT1 PE = 1 SV = | 1 | 1 | 0 | 2.1 | 1.2 |
| | 1 - [FERM1_HUMAN] | | | | | |
| Q9P2R3 | Rabankyrin-5 OS = Homo sapiens OX = 9606 GN = ANKFY1 PE = 1 SV = 2 - [ANFY1_HUMAN] | 1 | 1 | 0 | 1.1 | 0.5 |
| Q9Y2I7 | 1-phosphatidylinositol 3-phosphate 5-kinase OS = Homo sapiens OX = 9606 GN = PIKFYVE PE = | 1 | 1 | 0 | 0.4 | 0.4 |
| | 1 SV = 3 - [FYV1_HUMAN] | | | | | |
| O43314-2 | Isoform 2 of Inositol hexakisphosphate and diphosphoinositol-pentakisphosphate kinase 2 | 1 | 1 | 0 | 0.8 | 1.0 |
| | OS = Homo sapiens OX = 9606 GN = PPIP5K2 - [VIP2_HUMAN] | | | | | |
| O75616 | GTPase Era, mitochondrial OS = Homo sapiens OX = 9606 GN = ERAL1 PE = 1 SV = | 1 | 1 | 0 | 3.1 | 1.9 |
| | 2 - [ERAL1_HUMAN] | | | | | |
| P21281 | V-type proton ATPase subunit B, brain isoform OS = Homo sapiens OX = 9606 GN = ATP6V1B2 | 1 | 1 | 0 | 2.2 | 2.4 |
| | PE = 1 SV = 3 - [VATB2_HUMAN] | | | | | |
| P29966 | Myristoylated alanine-rich C-kinase substrate OS = Homo sapiens OX = 9606 GN = MARCKS | 1 | 1 | 0 | 3.8 | 3.8 |
| | PE = 1 SV = 4 - [MARCS_HUMAN] | | | | | |
| P49593-2 | Isoform 2 of Protein phosphatase 1F OS = Homo sapiens OX = 9606 GN = PPM1F - [PPM1F_HUMAN] | 1 | 1 | 0 | 2.9 | 3.7 |
| P49642 | DNA primase small subunit OS = Homo sapiens OX = 9606 GN = PRIM1 PE = 1 SV = | 1 | 1 | 0 | 1.7 | 1.7 |
| | 1 - [PRI1_HUMAN] | | | | | |
| P50570-2 | Isoform 2 of Dynamin-2 OS = Homo sapiens OX = 9606 GN = DNM2 - [DYN2_HUMAN] | 1 | 1 | 0 | 1.1 | 0.5 |
| P53814-5 | Isoform B2 of Smoothelin OS = Homo sapiens OX = 9606 GN = SMTN - [SMTN_HUMAN] | 1 | 1 | 0 | 0.8 | 0.8 |
| Q01433-2 | Isoform Ex1A-2-3 of AMP deaminase 2 OS = Homo sapiens OX = 9606 GN = AMPD2 - [AMPD2_HUMAN] | 1 | 1 | 0 | 0.9 | 1.3 |
| Q15418-4 | Isoform 4 of Ribosomal protein S6 kinase alpha-1 OS = Homo sapiens OX = 9606 GN = | 1 | 1 | 0 | 2.2 | 2.1 |
| | RPS6KA1 - [KS6A1_HUMAN] | | | | | |
| Q16881-5 | Isoform 5 of Thioredoxin reductase 1, cytoplasmic OS = Homo sapiens OX = 9606 GN = | 1 | 1 | 0 | 2.1 | 2.1 |
| | TXNRD1 - [TRXR1_HUMAN] | | | | | |
| Q6IAN0 | Dehydrogenase/reductase SDR family member 7B OS = Homo sapiens OX = 9606 GN = DHRS7B | 1 | 1 | 0 | 2.8 | 2.9 |
| | PE = 1 SV = 2 - [DRS7B_HUMAN] | | | | | |
| Q7L0Y3 | tRNA methyltransferase 10 homolog C OS = Homo sapiens OX = 9606 GN = TRMT10C PE = 1 | 1 | 1 | 0 | 1.7 | 1.7 |
| | SV = 2 - [TM10C_HUMAN] | | | | | |
| Q8WVX9 | Fatty acyl-CoA reductase 1 OS = Homo sapiens OX = 9606 GN = FAR1 PE = 1 SV = | 1 | 1 | 0 | 1.7 | 2.1 |
| | 1 - [FACR1_HUMAN] | | | | | |
| Q8WWC4 | m-AAA protease-interacting protein 1, mitochondrial OS = Homo sapiens OX = 9606 | 1 | 1 | 0 | 2.8 | 2.8 |
| | GN = MAIP1 PE = 1 SV = 1 - [MAIP1_HUMAN] | | | | | |
| Q96R06 | Sperm-associated antigen 5 OS = Homo sapiens OX = 9606 GN = SPAG5 PE = 1 | 1 | 1 | 0 | 0.8 | 0.7 |
| | SV = 2 - [SPAG5_HUMAN] | | | | | |
| Q96S44 | EKC/KEOPS complex subunit TP53RK OS = Homo sapiens OX = 9606 GN = TP53RK PE = 1 | 1 | 1 | 0 | 4.0 | 3.6 |
| | SV = 2 - [PRPK_HUMAN] | | | | | |
| Q99805 | Transmembrane 9 superfamily member 2 OS = Homo sapiens OX = 9606 GN = TM9SF2 PE = 1 | 1 | 1 | 0 | 1.9 | 1.7 |
| | SV = 1 - [TM9S2_HUMAN] | | | | | |
| Q9BT92 | Trichoplein keratin filament-binding protein OS = Homo sapiens OX = 9606 GN = TCHP | 1 | 1 | 0 | 1.3 | 1.3 |
| | PE = 1 SV = 1 - [TCHP_HUMAN] | | | | | |
| Q9H479 | Fructosamine-3-kinase OS = Homo sapiens OX = 9606 GN = FN3K PE = 1 SV = 1 - [FN3K_HUMAN] | 1 | 1 | 0 | 2.8 | 3.0 |
| Q9NVC6 | Mediator of RNA polymerase Il transcription subunit 17 OS = Homo sapiens OX = 9606 | 1 | 1 | 0 | 1.6 | 1.6 |
| | GN = MED17 PE = 1 SV = 2 - [MED17_HUMAN] | | | | | |
| Q9UM00-1 | Isoform 3 of Calcium load-activated calcium channel OS = Homo sapiens OX = 9606 | 1 | 1 | 0 | 4.1 | 4.1 |
| | GN = TMCO1 - [TMCO1_HUMAN] | | | | | |
| A6NNY8 | Ubiquitin carboxyl-terminal hydrolase 27 OS = Homo sapiens OX = 9606 GN = USP27X PE = 1 | 0 | 1 | 0 | 0.0 | 1.9 |
| | SV = 3 - [UBP27_HUMAN] | | | | | |
| O00186 | Syntaxin-binding protein 3 OS = Homo sapiens OX = 9606 GN = STXBP3 PE = 1 | 0 | 1 | 0 | 0.0 | 1.0 |
| | SV = 2 - [STXB3_HUMAN] | | | | | |
| O15066 | Kinesin-like protein KIF3B OS = Homo sapiens OX = 9606 GN = KIF3B PE = 1 | 0 | 1 | 0 | 0.0 | 1.3 |
| | SV = 1 - [KIF3B_HUMAN] | | | | | |
| O15294-3 | Isoform 1 of UDP-N-acetylglucosamine -- peptide N-acetylglucosaminyltransferase 110 | 0 | 1 | 0 | 0.0 | 0.7 |
| | kDasubunit OS = Homo sapiens OX = 9606 GN = OGT - [OGT1_HUMAN] | | | | | |
| O75879 | Glutamyl-tRNA(GIn) amidotransferase subunit B, mitochondrial OS = Homo sapiens OX = | 0 | 1 | 0 | 0.0 | 1.3 |
| | 9606 GN = GATB PE = 1 SV = 1 - [GATB_HUMAN] | | | | | |
| O95835-2 | Isoform 2 of Serine/threonine-protein kinase LATS1 OS = Homo sapiens OX = 9606 GN = | 0 | 1 | 0 | 0.0 | 2.0 |
| | LATS1 - [LATS1_HUMAN] | | | | | |
| O95983-2 | Isoform 2 of Methyl-CpG-binding domain protein 3 OS = Homo sapiens OX = 9606 GN = | 0 | 1 | 0 | 0.0 | 3.2 |
| | MBD3 - [MBD3_HUMAN] | | | | | |
| O95985-3 | Isoform 3 of DNA topoisomerase 3-beta-1 OS = Homo sapiens OX = 9606 GN = | 0 | 1 | 0 | 0.0 | 1.6 |
| | TOP3B - [TOP3B_HUMAN] | | | | | |
| P05026-2 | Isoform 2 of Sodium/potassium-transporting ATPase subunit beta-1 OS = Homo sapiens OX = | 0 | 1 | 0 | 0.0 | 3.0 |
| | 9606 GN = ATP1B1 - [AT1B1_HUMAN] | | | | | |
| P06858 | Lipoprotein lipase OS = Homo sapiens OX = 9606 GN = LPL PE = 1 SV = 1 - [LIPL_HUMAN] | 0 | 1 | 0 | 0.0 | 1.9 |
| P19447 | General transcription and DNA repair factor IIH helicase subunit XPB OS = Homo sapiens | 0 | 1 | 0 | 0.0 | 2.2 |
| | OX = 9606 GN = ERCC3 PE = 1 SV = 1 - [ERCC3_HUMAN] | | | | | |
| P19838 | Nuclear factor NF-kappa-B p105 subunit OS = Homo sapiens OX = 9606 GN = NFKB1 PE = | 0 | 1 | 0 | 0.0 | 1.0 |
| | 1 SV = 2 - [NFKB1_HUMAN] | | | | | |
| P21266 | Glutathione S-transferase Mu 3 OS = Homo sapiens OX = 9606 GN = GSTM3 PE = 1 SV = | 0 | 1 | 0 | 0.0 | 1.6 |
| | 3 - [GSTM3_HUMAN] | | | | | |
| P28074 | Proteasome subunit beta type-5 OS = Homo sapiens OX = 9606 GN = PSMB5 PE = 1 SV = | 0 | 1 | 0 | 0.0 | 2.9 |
| | 3 - [PSB5_HUMAN] | | | | | |
| P33897 | ATP-binding cassette sub-family D member 1 OS = Homo sapiens OX = 9606 GN = ABCD1 PE = 1 | 0 | 1 | 0 | 0.0 | 1.5 |
| | SV = 2 - [ABCD1_HUMAN] | | | | | |
| P39019 | 40S ribosomal protein S19 OS = Homo sapiens OX = 9606 GN = RPS19 PE = 1 SV = | 0 | 1 | 0 | 0.0 | 4.6 |
| | 2 - [RS19_HUMAN] | | | | | |
| P51570 | Galactokinase OS = Homo sapiens OX = 9606 GN = GALK1 PE = 1 SV = 1 - [GALK1_HUMAN] | 0 | 1 | 0 | 0.0 | 1.0 |
| P55010 | Eukaryotic translation initiation factor 5 05 = Homo sapiens OX = 9606 GN = EIF5 PE = 1 | 0 | 1 | 0 | 0.0 | 2.0 |
| | SV = 2 - [IF5_HUMAN] | | | | | |
| Q05932-3 | Isoform 3 of Folylpolyglutamate synthase, mitochondrial OS = Homo sapiens OX = 9606 | 0 | 1 | 0 | 0.0 | 2.4 |
| | GN = FPGS - [FOLC_HUMAN] | | | | | |
| Q12933-4 | Isoform 4 of TNF receptor-associated factor 2 OS = Homo sapiens OX = 9606 GN = | 0 | 1 | 0 | 0.0 | 1.5 |
| | TRAF2 - [TRAF2_HUMAN] | | | | | |
| Q13371-2 | Isoform 2 of Phosducin-like protein OS = Homo sapiens OX = 9606 GN = PDCL - [PHLP_HUMAN] | 0 | 1 | 0 | 0.0 | 4.3 |
| Q13442 | 28 kDa heat- and acid-stable phosphoprotein OS = Homo sapiens OX = 9606 GN = PDAP1 | 0 | 1 | 0 | 0.0 | 2.8 |
| | PE = 1 SV = 1 - [HAP28_HUMAN] | | | | | |
| Q14444-2 | Isoform 2 of Caprin-1 OS = Homo sapiens OX = 9606 GN = CAPRIN1 - [CAPR1_HUMAN] | 0 | 1 | 0 | 0.0 | 1.1 |
| Q6P996-3 | Isoform 3 of Pyridoxal-dependent decarboxylase domain-containing protein 1 OS = | 0 | 1 | 0 | 0.0 | 2.6 |
| | Homo sapiens OX = 9606 GN = PDXDC1 - [PDXD1_HUMAN] | | | | | |
| Q6PL18 | ATPase family AAA domain-containing protein 2 OS = Homo sapiens OX = 9606 GN = | 0 | 1 | 0 | 0.0 | 0.6 |
| | ATAD2 PE = 1 SV = 1 - [ATAD2_HUMAN] | | | | | |
| Q7Z3K3-5 | Isoform 5 of Pogo transposable element with ZNF domain OS = Homo sapiens OX = | 0 | 1 | 0 | 0.0 | 0.6 |
| | 9606 GN = POGZ - [POGZ_HUMAN] | | | | | |
| Q86U44 | N6-adenosine-methyltransferase catalytic subunit OS = Homo sapiens OX = 9606 GN = | 0 | 1 | 0 | 0.0 | 1.4 |
| | METTL3 PE = 1 SV = 2 - [MTA70_HUMAN] | | | | | |
| Q8IWA4 | Mitofusin-1 OS = Homo sapiens OX = 9606 GN = MFN1 PE = 1 SV = 3 - [MFN1_HUMAN] | 0 | 1 | 0 | 0.0 | 1.1 |
| Q8N5A5-3 | Isoform 3 of Zinc finger CCCH-type with G patch domain-containing protein OS = | 0 | 1 | 0 | 0.0 | 1.8 |
| | Homo sapiens OX = 9606 GN = ZGPAT - [ZGPAT_HUMAN] | | | | | |
| Q8N9M1-3 | Isoform 3 of Uncharacterized protein C19orf47 OS = Homo sapiens OX = 9606 GN = | 0 | 1 | 0 | 0.0 | 3.2 |
| | C19orf47 - [CS047_HUMAN] | | | | | |
| Q8NCN5 | Pyruvate dehydrogenase phosphatase regulatory subunit, mitochondrial OS = | 0 | 1 | 0 | 0.0 | 1.1 |
| | Homo sapiens OX = 9606 GN = PDPR PE = 1 SV = 2 - [PDPR_HUMAN] | | | | | |
| Q8NEY1-5 | Isoform 5 of Neuron navigator 1 OS = Homo sapiens OX = 9606 GN = NAV1 - [NAV1_HUMAN] | 0 | 1 | 0 | 0.0 | 0.7 |
| Q8NHH9-3 | Isoform 3 of Atlastin-2 OS = Homo sapiens OX = 9606 GN = ATL2 - [ATLA2_HUMAN] | 0 | 1 | 0 | 0.0 | 2.6 |
| Q8WUB8-3 | Isoform 3 of PHD finger protein 10 OS = Homo sapiens OX = 9606 GN = | 0 | 1 | 0 | 0.0 | 1.3 |
| | PHF10 - [PHF10_HUMAN] | | | | | |
| Q93074-3 | Isoform 3 of Mediator of RNA polymerase Il transcription subunit 12 OS = Homo sapiens | 0 | 1 | 0 | 0.0 | 0.4 |
| | OX = 9606 GN = MED12 - [MED12_HUMAN] | | | | | |
| Q969Z0 | FAST kinase domain-containing protein 4 OS = Homo sapiens OX = 9606 GN = TBRG4 PE = 1 | 0 | 1 | 0 | 0.0 | 1.5 |
| | SV = 1 - [FAKD4_HUMAN] | | | | | |
| Q96AG3-3 | Isoform 3 of Solute carrier family 25 member 46 OS = Homo sapiens OX = 9606 | 0 | 1 | 0 | 0.0 | 3.8 |
| | GN = SLC25A46 - [S2546_HUMAN] | | | | | |
| Q96C19 | EF-hand domain-containing protein D2 OS = Homo sapiens OX = 9606 GN = EFHD2 PE = 1 | 0 | 1 | 0 | 0.0 | 2.4 |
| | SV = 1 - [EFHD2_HUMAN] | | | | | |
| Q96FZ2 | Abasic site processing protein HMCES OS = Homo sapiens OX = 9606 GN = HMCES PE = 1 | 0 | 1 | 0 | 0.0 | 2.3 |
| | SV = 1 - [HMCES_HUMAN] | | | | | |
| Q9BQA1-2 | Isoform 2 of Methylosome protein 50 OS = Homo sapiens OX = 9606 GN = | 0 | 1 | 0 | 0.0 | 2.6 |
| | WDR77 - [MEP50_HUMAN] | | | | | |
| Q9BQI3-2 | Isoform 2 of Eukaryotic translation initiation factor 2-alpha kinase 1 OS = | 0 | 1 | 0 | 0.0 | 1.3 |
| | Homo sapiens OX = 9606 GN = EIF2AK1 - [E2AK1_HUMAN] | | | | | |
| Q9BRZ2 | E3 ubiquitin-protein ligase TRIM56 OS = Homo sapiens OX = 9606 GN = TRIM56 PE = 1 | 0 | 1 | 0 | 0.0 | 1.5 |
| | SV = 3 - [TRI56_HUMAN] | | | | | |
| Q9BTC8-2 | Isoform 2 of Metastasis-associated protein MTA3 OS = Homo sapiens OX = 9606 GN = | 0 | 1 | 0 | 0.0 | 1.6 |
| | MTA3 - [MTA3_HUMAN] | | | | | |
| Q9BUB7 | Transmembrane protein 70, mitochondrial OS = Homo sapiens OX = 9606 GN = TMEM70 | 0 | 1 | 0 | 0.0 | 2.6 |
| | PE = 1 SV = 2 - [TMM70_HUMAN] | | | | | |
| Q9BUN8-2 | Isoform 2 of Derlin-1 OS = Homo sapiens OX = 9606 GN = DERL1 - [DERL1_HUMAN] | 0 | 1 | 0 | 0.0 | 2.7 |
| Q9C0D2 | Centrosomal protein of 295 kDa OS = Homo sapiens OX = 9606 GN = CEP295 PE = 1 | 0 | 1 | 0 | 0.0 | 0.3 |
| | SV = 4 - [CE295_HUMAN] | | | | | |
| Q9H3M7-2 | Isoform 2 of Thioredoxin-interacting protein OS = Homo sapiens OX = 9606 GN = | 0 | 1 | 0 | 0.0 | 2.9 |
| | TXNIP - [TXNIP_HUMAN] | | | | | |
| Q9H4H8-2 | Isoform 2 of Protein FAM83D OS = Homo sapiens OX = 9606 GN = FAM83D - [FA83D_HUMAN] | 0 | 1 | 0 | 0.0 | 1.6 |
| Q9H6R4-4 | Isoform 4 of Nucleolar protein 6 OS = Homo sapiens OX = 9606 GN = NOL6 - [NOL6_HUMAN] | 0 | 1 | 0 | 0.0 | 0.7 |
| Q9H788-2 | Isoform 2 of SH2 domain-containing protein 4A OS = Homo sapiens OX = 9606 GN = | 0 | 1 | 0 | 0.0 | 2.0 |
| | SH2D4A - [SH24A_HUMAN] | | | | | |
| Q9H936 | Mitochondrial glutamate carrier 1 OS = Homo sapiens OX = 9606 GN = SLC25A22 PE = 1 | 0 | 1 | 0 | 0.0 | 1.8 |
| | SV = 1 - [GHC1_HUMAN] | | | | | |
| Q9HAD4 | WD repeat-containing protein 41 OS = Homo sapiens OX = 9606 GN = WDR41 PE = 1 | 0 | 1 | 0 | 0.0 | 2.5 |
| | SV = 3 - [WDR41_HUMAN] | | | | | |
| Q9NP97 | Dynein light chain roadblock-type 1 OS = Homo sapiens OX = 9606 GN = DYNLRB1 PE = 1 | 0 | 1 | 0 | 0.0 | 11.5 |
| | SV = 3 - [DLRB1_HUMAN] | | | | | |
| Q9NUL3-4 | Isoform 4 of Double-stranded RNA-binding protein Staufen homolog 2 OS = Homo sapiens | 0 | 1 | 0 | 0.0 | 2.8 |
| | OX = 9606 GN = STAU2 - [STAU2_HUMAN] | | | | | |
| Q9NUQ7 | Ufm1-specific protease 2 OS = Homo sapiens OX = 9606 GN = UFSP2 PE = 1 SV = | 0 | 1 | 0 | 0.0 | 2.6 |
| | 3 - [UFSP2_HUMAN] | | | | | |
| Q9NVH1-3 | Isoform 3 of DnaJ homolog subfamily C member 11 OS = Homo sapiens OX = 9606 GN = | 0 | 1 | 0 | 0.0 | 1.8 |
| | DNAJC11 - [DJC11_HUMAN] | | | | | |
| Q9NWU5-2 | Isoform 2 of 39S ribosomal protein L22, mitochondrial OS = Homo sapiens OX = 9606 | 0 | 1 | 0 | 0.0 | 5.3 |
| | GN = MRPL22 - [RM22_HUMAN] | | | | | |
| Q9NWY4 | Histone PARylation factor 1 OS = Homo sapiens OX = 9606 GN = HPF1 PE = 1 SV = | 0 | 1 | 0 | 0.0 | 2.4 |
| | 2 - [HPF1_HUMAN] | | | | | |
| Q9NZL9-4 | Isoform 4 of Methionine adenosyltransferase 2 subunit beta OS = Homo sapiens OX = | 0 | 1 | 0 | 0.0 | 2.3 |
| | 9606 GN = MAT2B - [MAT2B_HUMAN] | | | | | |
| Q9P0W2-2 | Isoform 2 of SWI/SNF-related matrix-associated actin-dependent regulator of chromatin | 0 | 1 | 0 | 0.0 | 2.6 |
| | subfamily E member 1-related OS = Homo sapiens OX = 9606 GN = HMG20B - [HM20B_HUMAN] | | | | | |
| Q9P2Y4 | Zinc finger protein 219 OS = Homo sapiens OX = 9606 GN = ZNF219 PE = 1 | 0 | 1 | 0 | 0.0 | 1.8 |
| | SV = 2 - [ZN219_HUMAN] | | | | | |
| Q9UKY7-2 | Isoform 2 of Protein CDV3 homolog OS = Homo sapiens OX = 9606 GN = CDV3 - [CDV3_HUMAN] | 0 | 1 | 0 | 0.0 | 6.4 |
| Q9UMX1 | Suppressor of fused homolog OS = Homo sapiens OX = 9606 GN = SUFU PE = 1 | 0 | 1 | 0 | 0.0 | 2.3 |
| | SV = 2 - [SUFU_HUMAN] | | | | | |
| Q9Y2Z2-2 | Isoform 1 of Protein MTO1 homolog, mitochondrial OS = Homo sapiens OX = 9606 | 0 | 1 | 0 | 0.0 | 1.4 |
| | GN = MTO1 - [MTO1_HUMAN] | | | | | |
| Q9Y3S2 | Zinc finger protein 330 OS = Homo sapiens OX = 9606 GN = ZNF330 PE = 1 SV = | 0 | 1 | 0 | 0.0 | 2.6 |
| | 1 - [ZN330_HUMAN] | | | | | |
| Q9Y6V7 | Probable ATP-dependent RNA helicase DDX49 OS = Homo sapiens OX = 9606 GN = DDX49 | 0 | 1 | 0 | 0.0 | 2.9 |
| | PE = 1 SV = 1 - [DDX49_HUMAN] | | | | | |
| P18031 | Tyrosine-protein phosphatase non-receptor type 1 OS = Homo sapiens OX = 9606 | 5 | 0 | 0 | 11.9 | 0.0 |
| | GN = PTPN1 PE = 1 SV = 1 - [PTN1_HUMAN] | | | | | |
| P30837 | Aldehyde dehydrogenase X, mitochondrial OS = Homo sapiens OX = 9606 GN = ALDH1B1 | 5 | 0 | 0 | 8.1 | 0.0 |
| | PE = 1 SV = 3 - [AL1B1_HUMAN] | | | | | |
| Q9BVL4 | Protein adenylyltransferase SeIO, mitochondrial OS = Homo sapiens OX = 9606 | 4 | 0 | 0 | 5.8 | 0.0 |
| | GN = SELENOO PE = 1 SV = 3 - [SELO_HUMAN] | | | | | |
| Q17RY0-2 | Isoform 2 of Cytoplasmic polyadenylation element-binding protein 4 OS = Homo sapiens | 3 | 0 | 0 | 3.9 | 0.0 |
| | OX = 9606 GN = CPEB4 - [CPEB4_HUMAN] | | | | | |
| Q92890 | Ubiquitin recognition factor in ER-associated degradation protein 1 OS = Homo sapiens | 2 | 0 | 0 | 10.0 | 0.0 |
| | OX = 9606 GN = UFD1 PE = 1 SV = 3 - [UFD1_HUMAN] | | | | | |
| P46783 | 40S ribosomal protein S10 OS = Homo sapiens OX = 9606 GN = RPS10 PE = 1 | 2 | 0 | 0 | 11.5 | 0.0 |
| | SV = 1 - [RS10_HUMAN] | | | | | |
| Q6YP21-3 | Isoform 3 of Kynurenine -- oxoglutarate transaminase 3 OS = Homo sapiens OX = 9606 | 2 | 0 | 0 | 7.6 | 0.0 |
| | GN = KYAT3 - [KAT3_HUMAN] | | | | | |
| Q8WUF5 | RelA-associated inhibitor OS = Homo sapiens OX = 9606 GN = PPP1R13L PE = 1 | 2 | 0 | 0 | 3.6 | 0.0 |
| | SV = 4 - [IASPP_HUMAN] | | | | | |
| Q9Y6Y0 | Influenza virus NS1A-binding protein OS = Homo sapiens OX = 9606 GN = IVNS1ABP | 2 | 0 | 0 | 3.2 | 0.0 |
| | PE = 1 SV = 3 - [NS1BP_HUMAN] | | | | | |
| E9PRG8 | Uncharacterized protein C11orf98 OS = Homo sapiens OX = 9606 GN = C11orf98 PE = 4 | 2 | 0 | 0 | 15.2 | 0.0 |
| | SV = 2 - [CK098_HUMAN] | | | | | |
| O43896 | Kinesin-like protein KIF1C OS = Homo sapiens OX = 9606 GN = KIF1C PE = 1 | 2 | 0 | 0 | 2.0 | 0.0 |
| | SV = 3 - [KIF1C_HUMAN] | | | | | |
| Q9H267 | Vacuolar protein sorting-associated protein 33B OS = Homo sapiens OX = 9606 GN = | 2 | 0 | 0 | 2.4 | 0.0 |
| | VPS33B PE = 1 SV = 2 - [VP33B_HUMAN] | | | | | |
| P62258-2 | Isoform SV of 14-3-3 protein epsilon OS = Homo sapiens OX = 9606 GN = | 1 | 0 | 0 | 5.2 | 0.0 |
| | YWHAE - [1433E_HUMAN] | | | | | |
| Q99439-2 | Isoform 2 of Calponin-2 OS = Homo sapiens OX = 9606 GN = CNN2 - [CNN2_HUMAN] | 1 | 0 | 0 | 3.2 | 0.0 |
| Q9GZS1 | DNA-directed RNA polymerase I subunit RPA49 OS = Homo sapiens OX = 9606 GN = | 1 | 0 | 0 | 3.5 | 0.0 |
| | POLR1E PE = 1 SV = 3 - [RPA49_HUMAN] | | | | | |
| Q9NYL2 | Mitogen-activated protein kinase kinase kinase 20 OS = Homo sapiens OX = | 1 | 0 | 0 | 1.7 | 0.0 |
| | 9606 GN = MAP3K20 PE = 1 SV = 3 - [M3K20_HUMAN] | | | | | |
| Q9NZJO | Denticleless protein homolog OS = Homo sapiens OX = 9606 GN = DTL PE = 1 | 1 | 0 | 0 | 2.8 | 0.0 |
| | SV = 3 - [DTL_HUMAN] | | | | | |
| Q9UFCO | Leucine-rich repeat and WD repeat-containing protein 1 OS = Homo sapiens | 1 | 0 | 0 | 3.0 | 0.0 |
| | OX = 9606 GN = LRWD1 PE = 1 SV = 2 - [LRWD1_HUMAN] | | | | | |
| Q9Y2U8 | Inner nuclear membrane protein Man1 OS = Homo sapiens OX = 9606 GN = LEMD3 | 1 | 0 | 0 | 2.2 | 0.0 |
| | PE = 1 SV = 2 - [MAN1_HUMAN] | | | | | |
| O00443 | Phosphatidylinositol 4-phosphate 3-kinase C2 domain-containing subunit alpha | 1 | 0 | 0 | 0.8 | 0.0 |
| | [P3C2A_HUMAN] | | | | | |
| Q15070-2 | Isoform 2 of Mitochondrial inner membrane protein OXA1L OS = Homo sapiens OX = 9606 | 1 | 0 | 0 | 2.9 | 0.0 |
| | GN = OXA1L - [OXA1L_HUMAN] | | | | | |
| Q15814 | Tubulin-specific chaperone C OS = Homo sapiens OX = 9606 GN = TBCC PE = | 1 | 0 | 0 | 3.0 | 0.0 |
| | 1 SV = 2 - [TBCC_HUMAN] | | | | | |
| Q5T7W7 | Thiosulfate sulfurtransferase/rhodanese-like domain-containing protein 2 OS = | 1 | 0 | 0 | 2.2 | 0.0 |
| | Homo sapiens OX = 9606 GN = PIK3C2A PE = 1 SV = 2 - [TSTD2_HUMAN] | | | | | |
| Q6P1Q9 | Methyltransferase-like protein 2B OS = Homo sapiens OX = 9606 GN = METTL2B PE = 1 | 1 | 0 | 0 | 3.3 | 0.0 |
| | SV = 3 - [MET2B_HUMAN] | | | | | |
| Q969S9-2 | Isoform 2 of Ribosome-releasing factor 2, mitochondrial OS = Homo sapiens | 1 | 0 | 0 | 1.2 | 0.0 |
| | OX = 9606 GN = GFM2 - [RRF2M_HUMAN] | | | | | |
| Q9BQ70 | Transcription factor 25 OS = Homo sapiens OX = 9606 GN = TCF25 PE = 1 | 1 | 0 | 0 | 2.6 | 0.0 |
| | SV = 1 - [TCF25_HUMAN] | | | | | |
| Q9H1H9-3 | Isoform 3 of Kinesin-like protein KIF13A OS = Homo sapiens OX = 9606 | 1 | 0 | 0 | 0.6 | 0.0 |
| | GN = KIF13A - [KI13A_HUMAN] | | | | | |
| Q9UL54-2 | Isoform 2 of Serine/threonine-protein kinase TAO2 OS = Homo sapiens OX = 9606 | 1 | 0 | 0 | 1.1 | 0.0 |
| | GN = TAOK2 - [TAOK2_HUMAN] | | | | | |
| O15198-2 | Isoform B of Mothers against decapentaplegic homolog 9 OS = Homo sapiens | 1 | 0 | 0 | 1.9 | 0.0 |
| | OX = 9606 GN = SMAD9 - [SMAD9_HUMAN] | | | | | |
| O15270 | Serine palmitoyltransferase 2 OS = Homo sapiens OX = 9606 GN = SPTLC2 PE = 1 | 1 | 0 | 0 | 1.5 | 0.0 |
| | SV = 1 - [SPTC2_HUMAN] | | | | | |
| O43294-2 | Isoform 2 of Transforming growth factor beta-1-induced transcript 1 protein OS = | 1 | 0 | 0 | 1.9 | 0.0 |
| | Homo sapiens OX = 9606 GN = TGFB111 - [TGFI1_HUMAN] | | | | | |
| O43402 | ER membrane protein complex subunit 8 OS = Homo sapiens OX = 9606 GN = EMC8 PE = 1 | 1 | 0 | 0 | 5.6 | 0.0 |
| | SV = 1 - [EMC8_HUMAN] | | | | | |
| O43852-5 | Isoform 5 of Calumenin OS = Homo sapiens OX = 9606 GN = CALU - [CALU_HUMAN] | 1 | 0 | 0 | 3.5 | 0.0 |
| O60256 | Phosphoribosyl pyrophosphate synthase-associated protein 2 OS = Homo sapiens | 1 | 0 | 0 | 3.5 | 0.0 |
| | OX = 9606 GN = PRPSAP2 PE = 1 SV = 1 - [KPRB_HUMAN] | | | | | |
| O60869-2 | Isoform 2 of Endothelial differentiation-related factor 1 OS = Homo sapiens | 1 | 0 | 0 | 5.5 | 0.0 |
| | OX = 9606 GN = EDF1 - [EDF1_HUMAN] | | | | | |
| O75955-2 | Isoform 2 of Flotillin-1 OS = Homo sapiens OX = 9606 GN = FLOT1 - [FLOT1_HUMAN] | 1 | 0 | 0 | 2.8 | 0.0 |
| P06788 | Protein E7 OS = Human papillomavirus type 18 OX = 333761 GN = E7 PE = 1 | 1 | 0 | 0 | 4.1 | 0.0 |
| | SV = 2 - [VE7_HPV18] | | | | | |
| P09429 | High mobility group protein B1 OS = Homo sapiens OX = 9606 GN = HMGB1 PE = 1 | 1 | 0 | 0 | 4.7 | 0.0 |
| | SV = 3 - [HMGB1_HUMAN] | | | | | |
| P17252 | Protein kinase C alpha type OS = Homo sapiens OX = 9606 GN = PRKCA PE = 1 | 1 | 0 | 0 | 1.2 | 0.0 |
| | SV = 4 - [KPCA_HUMAN] | | | | | |
| P35270 | Sepiapterin reductase OS = Homo sapiens OX = 9606 GN = SPR PE = 1 | 1 | 0 | 0 | 4.5 | 0.0 |
| | SV = 1 - [SPRE_HUMAN] | | | | | |
| P38117 | Electron transfer flavoprotein subunit beta OS = Homo sapiens OX = 9606 | 1 | 0 | 0 | 2.7 | 0.0 |
| | GN = ETFB PE = 1 SV = 3 - [ETFB_HUMAN] | | | | | |
| P41214 | Eukaryotic translation initiation factor 2D OS = Homo sapiens OX = 9606 | 1 | 0 | 0 | 1.8 | 0.0 |
| | GN = EIF2D PE = 1 SV = 3 - [EIF2D_HUMAN] | | | | | |
| P51116 | Fragile X mental retardation syndrome-related protein 2 OS = Homo sapiens OX = | 1 | 0 | 0 | 1.2 | 0.0 |
| | 9606 GN = FXR2 PE = 1 SV = 2 - [FXR2_HUMAN] | | | | | |
| P53582 | Methionine aminopeptidase 1 OS = Homo sapiens OX = 9606 GN = METAP1 PE = 1 | 1 | 0 | 0 | 1.9 | 0.0 |
| | SV = 2 - [MAP11_HUMAN] | | | | | |
| P53680-2 | Isoform 2 of AP-2 complex subunit sigma OS = Homo sapiens OX = 9606 | 1 | 0 | 0 | 5.1 | 0.0 |
| | GN = AP2S1 - [AP2S1_HUMAN] | | | | | |
| P78362 | SRSF protein kinase 2 OS = Homo sapiens OX = 9606 GN = SRPK2 PE = 1 | 1 | 0 | 0 | 1.5 | 0.0 |
| | SV = 3 - [SRPK2_HUMAN] | | | | | |
| P82912-2 | Isoform 2 of 28S ribosomal protein S11, mitochondrial OS = Homo sapiens | 1 | 0 | 0 | 4.8 | 0.0 |
| | OX = 9606 GN = MRPS11 - [RT11_HUMAN] | | | | | |
| Q03164-2 | Isoform 2 of Histone-lysine N-methyltransferase 2A OS = Homo sapiens | 1 | 0 | 0 | 0.2 | 0.0 |
| | OX = 9606 GN = KMT2A - [KMT2A_HUMAN] | | | | | |
| Q05682-5 | Isoform 5 of Caldesmon OS = Homo sapiens OX = 9606 GN = CALD1 - [CALD1_HUMAN] | 1 | 0 | 0 | 2.1 | 0.0 |
| Q13332-6 | Isoform 2 of Receptor-type tyrosine-protein phosphatase S OS = Homo sapiens | 1 | 0 | 0 | 0.6 | 0.0 |
| | OX = 9606 GN = PTPRS - [PTPRS_HUMAN] | | | | | |
| Q13555-10 | Isoform 10 of Calcium/calmodulin-dependent protein kinase type II subunit | 1 | 0 | 0 | 1.6 | 0.0 |
| | [gamma OS = Homo sapiens OX = 9606 GN = CAMK2G - KCC2G_HUMAN] | | | | | |
| Q13888 | General transcription factor IIH subunit 2 OS = Homo sapiens OX = 9606 GN = | 1 | 0 | 0 | 1.5 | 0.0 |
| | GTF2H2 PE = 1 SV = 1 - [TF2H2_HUMAN] | | | | | |
| Q14106-2 | Isoform 2 of Protein Tob2 OS = Homo sapiens OX = 9606 GN = TOB2 - [TOB2_HUMAN] | 1 | 0 | 0 | 3.5 | 0.0 |
| Q14116-2 | Isoform 2 of Interleukin-18 OS = Homo sapiens OX = 9606 GN = IL18 - [IL18_HUMAN] | 1 | 0 | 0 | 3.5 | 0.0 |
| Q15036-2 | Isoform 2 of Sorting nexin-17 OS = Homo sapiens OX = 9606 GN = | 1 | 0 | 0 | 2.1 | 0.0 |
| | SNX17 - [SNX17_HUMAN] | | | | | |
| Q15058 | Kinesin-like protein KIF14 OS = Homo sapiens OX = 9606 GN = KIF14 PE = 1 | 1 | 0 | 0 | 0.4 | 0.0 |
| | SV = 1 - [KIF14_HUMAN] | | | | | |
| Q15437 | Protein transport protein Sec23B OS = Homo sapiens OX = 9606 GN = SEC23B | 1 | 0 | 0 | 1.1 | 0.0 |
| | PE = 1 SV = 2 - [SC23B_HUMAN] | | | | | |
| Q5VST9-5 | Isoform 4 of Obscurin OS = Homo sapiens OX = 9606 GN = OBSCN - [OBSCN_HUMAN] | 1 | 0 | 0 | 0.2 | 0.0 |
| Q5VYK3 | Proteasome adapter and scaffold protein ECM29 OS = Homo sapiens OX = 9606 GN = | 1 | 0 | 0 | 0.4 | 0.0 |
| | ECPAS PE = 1 SV = 2 - [ECM29_HUMAN] | | | | | |
| Q5VZL5-2 | Isoform 2 of Zinc finger MYM-type protein 4 OS = Homo sapiens OX = 9606 GN = | 1 | 0 | 0 | 1.3 | 0.0 |
| | ZMYM4 - [ZMYM4_HUMAN] | | | | | |
| Q6P1N0-2 | Isoform 2 of Coiled-coil and C2 domain-containing protein 1A OS = Homo sapiens | 1 | 0 | 0 | 0.9 | 0.0 |
| | OX = 9606 GN = CC2D1A - [C2D1A_HUMAN] | | | | | |
| Q7L7X3-3 | Isoform 3 of Serine/threonine-protein kinase TAO1 OS = Homo sapiens OX = 9606 | 1 | 0 | 0 | 0.9 | 0.0 |
| | GN = TAOK1 - [TAOK1_HUMAN] | | | | | |
| Q86UL3 | Glycerol-3-phosphate acyltransferase 4 OS = Homo sapiens OX = 9606 GN = GPAT4 | 1 | 0 | 0 | 1.8 | 0.0 |
| | PE = 1 SV = 1 - [GPAT4_HUMAN] | | | | | |
| Q86V81 | THO complex subunit 4 OS = Homo sapiens OX = 9606 GN = ALYREF PE = 1 | 1 | 0 | 0 | 3.8 | 0.0 |
| | SV = 3 - [THOC4_HUMAN] | | | | | |
| Q86VM9 | Zinc finger CCCH domain-containing protein 18 OS = Homo sapiens OX = 9606 | 1 | 0 | 0 | 1.2 | 0.0 |
| | GN = ZC3H18 PE = 1 SV = 2 - [ZCH18_HUMAN] | | | | | |
| Q86VP6 | Cullin-associated NEDD8-dissociated protein 1 OS = Homo sapiens OX = 9606 | 1 | 0 | 0 | 0.7 | 0.0 |
| | GN = CAND1 PE = 1 SV = 2 - [CAND1_HUMAN] | | | | | |
| Q86W56 | Poly(ADP-ribose) glycohydrolase OS = Homo sapiens OX = 9606 GN = PARG PE = 1 | 1 | 0 | 0 | 0.8 | 0.0 |
| | SV = 1 - [PARG_HUMAN] | | | | | |
| Q8IZ73-2 | Isoform 2 of RNA pseudouridylate synthase domain-containing protein 2 OS = | 1 | 0 | 0 | 2.5 | 0.0 |
| | Homo sapiens OX = 9606 GN = RPUSD2 - [RUSD2_HUMAN] | | | | | |
| Q8N1G4 | Leucine-rich repeat-containing protein 47 OS = Homo sapiens OX = 9606 GN = | 1 | 0 | 0 | 1.4 | 0.0 |
| | LRRC47 PE = 1 SV = 1 - [LRC47_HUMAN] | | | | | |
| Q8N726-2 | Isoform smARF of Tumor suppressor ARF OS = Homo sapiens OX = 9606 | 1 | 0 | 0 | 10.6 | 0.0 |
| | GN = CDKN2A - [ARF_HUMAN] | | | | | |
| Q8ND56-3 | Isoform 3 of Protein LSM14 homolog A OS = Homo sapiens OX = 9606 GN = | 1 | 0 | 0 | 2.5 | 0.0 |
| | LSM14A - [LS14A_HUMAN] | | | | | |
| Q8NF37 | Lysophosphatidylcholine acyltransferase 1 OS = Homo sapiens OX = 9606 GN = LPCAT1 | 1 | 0 | 0 | 1.3 | 0.0 |
| | PE = 1 SV = 2 - [PCAT1_HUMAN] | | | | | |
| Q8TCG1-2 | Isoform 2 of Protein CIP2A OS = Homo sapiens OX = 9606 GN = CIP2A - [CIP2A_HUMAN] | 1 | 0 | 0 | 1.3 | 0.0 |
| Q8WXG6-6 | Isoform 6 of MAP kinase-activating death domain protein OS = Homo sapiens OX = 9606 | 1 | 0 | 0 | 0.5 | 0.0 |
| | GN = MADD - [MADD_HUMAN] | | | | | |
| Q92538-3 | Isoform 3 of Golgi-specific brefeldin A-resistance guanine nucleotide exchange | 1 | 0 | 0 | 0.5 | 0.0 |
| | factor 1 OS = Homo sapiens OX = 9606 GN = GBF1 - [GBF1_HUMAN] | | | | | |
| Q96RE7 | Nucleus accumbens-associated protein 1 OS = Homo sapiens OX = 9606 GN = NACC1 | 1 | 0 | 0 | 1.2 | 0.0 |
| | PE = 1 SV = 1 - [NACC1_HUMAN] | | | | | |
| Q99497 | Protein/nucleic acid deglycase DJ-1 OS = Homo sapiens OX = 9606 GN = PARK7 | 1 | 0 | 0 | 7.2 | 0.0 |
| | PE = 1 SV = 2 - [PARK7_HUMAN] | | | | | |
| Q9BTL3 | RNA guanine-N7 methyltransferase activating subunit OS = Homo sapiens OX = 9606 | 1 | 0 | 0 | 6.5 | 0.0 |
| | GN = RAMAC PE = 1 SV = 1 - [RAMAC_HUMAN] | | | | | |
| Q9BU76-4 | Isoform 4 of Multiple myeloma tumor-associated protein 2 OS = Homo sapiens | 1 | 0 | 0 | 4.8 | 0.0 |
| | OX = 9606 GN = MMTAG2 - [MMTA2_HUMAN] | | | | | |
| Q9BUH8 | Brain-enriched guanylate kinase-associated protein OS = Homo sapiens OX = 9606 | 1 | 0 | 0 | 1.2 | 0.0 |
| | GN = BEGAIN PE = 1 SV = 1 - [BEGIN_HUMAN] | | | | | |
| Q9BUZ4 | TNF receptor-associated factor 4 OS = Homo sapiens OX = 9606 GN = TRAF4 PE = 1 | 1 | 0 | 0 | 2.0 | 0.0 |
| | SV = 1 - [TRAF4_HUMAN] | | | | | |
| Q9C0J8 | pre-mRNA 3′ end processing protein WDR33 OS = Homo sapiens OX = 9606 GN = WDR33 | 1 | 0 | 0 | 0.5 | 0.0 |
| | PE = 1 SV = 2 - [WDR33_HUMAN] | | | | | |
| Q9H8H0 | Nucleolar protein 11 OS = Homo sapiens OX = 9606 GN = NOL11 PE = 1 | 1 | 0 | 0 | 1.5 | 0.0 |
| | SV = 1 - [NOL11_HUMAN] | | | | | |
| Q9NVZ3-4 | Isoform 4 of Adaptin ear-binding coat-associated protein 2 OS = Homo sapiens | 1 | 0 | 0 | 6.3 | 0.0 |
| | OX = 9606 GN = NECAP2 - [NECP2_HUMAN] | | | | | |
| Q9NYL2-2 | Isoform 2 of Mitogen-activated protein kinase kinase kinase 20 OS = Homo sapiens | 1 | 0 | 0 | 1.5 | 0.0 |
| | OX = 9606 GN = MAP3K20 - [M3K20_HUMAN] | | | | | |
| Q9NZT1 | Calmodulin-like protein 5 OS = Homo sapiens OX = 9606 GN = CALML5 PE = 1 | 1 | 0 | 0 | 7.1 | 0.0 |
| | SV = 2 - [CALL5_HUMAN] | | | | | |
| Q9P2I0 | Cleavage and polyadenylation specificity factor subunit 2 OS = Homo sapiens | 1 | 0 | 0 | 1.1 | 0.0 |
| | OX = 9606 GN = CPSF2 PE = 1 SV = 2 - [CPSF2_HUMAN] | | | | | |
| Q9UJK0 | Ribosome biogenesis protein TSR3 homolog OS = Homo sapiens OX = 9606 | 1 | 0 | 0 | 3.1 | 0.0 |
| | GN = TSR3 PE = 1 SV = 1 - [TSR3_HUMAN] | | | | | |
| Q9UKL0 | REST corepressor 1 OS = Homo sapiens OX = 9606 GN = RCOR1 PE = 1 | 1 | 0 | 0 | 2.1 | 0.0 |
| | SV = 2 - [RCOR1_HUMAN] | | | | | |
| Q9ULV4 | Coronin-1C OS = Homo sapiens OX = 9606 GN = CORO1C PE = 1 SV = 1 - [COR1C_HUMAN] | 1 | 0 | 0 | 1.5 | 0.0 |
| Q9Y2S6 | Translation machinery-associated protein 7 OS = Homo sapiens OX = 9606 | 1 | 0 | 0 | 6.3 | 0.0 |
| | GN = TMA7 PE = 1 SV = 1 - [TMA7_HUMAN] | | | | | |
| Q9Y2Z4 | Tyrosine -- tRNA ligase, mitochondrial OS = Homo sapiens OX = 9606 GN = YARS2 | 1 | 0 | 0 | 2.4 | 0.0 |
| | PE = 1 SV = 2 - [SYYM_HUMAN] | | | | | |
| Q9Y619 | Mitochondrial ornithine transporter 1 OS = Homo sapiens OX = 9606 GN = SLC25A15 | 1 | 0 | 0 | 2.3 | 0.0 |
| | PE = 1 SV = 1 - [ORNT1_HUMAN] | | | | | |
| A0PJW6 | Transmembrane protein 223 OS = Homo sapiens OX = 9606 GN = TMEM223 PE = 1 | 0 | 0 | 0 | 0.0 | 0.0 |
| | SV = 1 - [TM223_HUMAN] | | | | | |
| O00401 | Neural Wiskott-Aldrich syndrome protein OS = Homo sapiens OX = 9606 GN = WASL | 0 | 0 | 0 | 0.0 | 0.0 |
| | PE = 1 SV = 2 - [WASL_HUMAN] | | | | | |
| O00422 | Histone deacetylase complex subunit SAP18 OS = Homo sapiens OX = 9606 GN = | 0 | 0 | 0 | 0.0 | 0.0 |
| | SAP18 PE = 1 SV = 1 - [SAP18_HUMAN] | | | | | |
| O00522 | Krev interaction trapped protein 1 OS = Homo sapiens OX = 9606 GN = KRIT1 | 0 | 0 | 0 | 0.0 | 0.0 |
| | PE = 1 SV = 2 - [KRIT1_HUMAN] | | | | | |
| O14641 | Segment polarity protein dishevelled homolog DVL-2 OS = Homo sapiens OX = | 0 | 0 | 0 | 0.0 | 0.0 |
| | 9606 GN = DVL2 PE = 1 SV = 1 - [DVL2_HUMAN] | | | | | |
| O14802 | DNA-directed RNA polymerase Ill subunit RPC1 OS = Homo sapiens OX = 9606 | 0 | 0 | 0 | 0.0 | 0.0 |
| | GN = POLR3A PE = 1 SV = 2 - [RPC1_HUMAN] | | | | | |
| O14879 | Interferon-induced protein with tetratricopeptide repeats 3 OS = Homo sapiens | 0 | 0 | 0 | 0.0 | 0.0 |
| | OX = 9606 GN = IFIT3 PE = 1 SV = 1 - [IFIT3_HUMAN] | | | | | |
| O14974-5 | Isoform 5 of Protein phosphatase 1 regulatory subunit 12A OS = Homo sapiens | 0 | 0 | 0 | 0.0 | 0.0 |
| | OX = 9606 GN = PPP1R12A - [MYPT1_HUMAN] | | | | | |
| O15111 | Inhibitor of nuclear factor kappa-B kinase subunit alpha OS = Homo sapiens | 0 | 0 | 0 | 0.0 | 0.0 |
| | OX = 9606 GN = CHUK PE = 1 SV = 2 - [IKKA_HUMAN] | | | | | |
| O15118 | NPC intracellular cholesterol transporter 1 OS = Homo sapiens OX = 9606 | 0 | 0 | 0 | 0.0 | 0.0 |
| | GN = NPC1 PE = 1 SV = 2 - [NPC1_HUMAN] | | | | | |
| O15213 | WD repeat-containing protein 46 OS = Homo sapiens OX = 9606 GN = WDR46 | 0 | 0 | 0 | 0.0 | 0.0 |
| | PE = 1 SV = 3 - [WDR46_HUMAN] | | | | | |
| O15533-2 | Isoform 2 of Tapasin OS = Homo sapiens OX = 9606 GN = TAPBP - [TPSN_HUMAN] | 0 | 0 | 0 | 0.0 | 0.0 |
| O43251-6 | Isoform 6 of RNA binding protein fox-1 homolog 2 OS = Homo sapiens OX = 9606 | 0 | 0 | 0 | 0.0 | 0.0 |
| | GN = RBFOX2 - [RFOX2_HUMAN] | | | | | |
| O43426 | Synaptojanin-1 OS = Homo sapiens OX = 9606 GN = SYNJ1 PE = 1 SV = | 0 | 0 | 0 | 0.0 | 0.0 |
| | 2 - [SYNJ1_HUMAN] | | | | | |
| O43707 | Alpha-actinin-4 OS = Homo sapiens OX = 9606 GN = ACTN4 PE = 1 SV = | 0 | 0 | 0 | 0.0 | 0.0 |
| | 2 - [ACTN4_HUMAN] | | | | | |
| O43837-3 | Isoform C of Isocitrate dehydrogenase [NAD] subunit beta, mitochondrial | 0 | 0 | 0 | 0.0 | 0.0 |
| | OS = Homo sapiens OX = 9606 GN = IDH3B - [IDH3B_HUMAN] | | | | | |
| O60216 | Double-strand-break repair protein rad21 homolog OS = Homo sapiens | 0 | 0 | 0 | 0.0 | 0.0 |
| | OX = 9606 GN = RAD21 PE = 1 SV = 2 - [RAD21_HUMAN] | | | | | |
| O60318 | Germinal-center associated nuclear protein OS = Homo sapiens OX = | 0 | 0 | 0 | 0.0 | 0.0 |
| | 9606 GN = MCM3AP PE = 1 SV = 2 - [GANP_HUMAN] | | | | | |
| O60524-4 | Isoform 4 of Nuclear export mediator factor NEMF OS = Homo sapiens | 0 | 0 | 0 | 0.0 | 0.0 |
| | OX = 9606 GN = NEMF - [NEMF_HUMAN] | | | | | |
| O60684 | Importin subunit alpha-7 OS = Homo sapiens OX = 9606 GN = KPNA6 PE = 1 | 0 | 0 | 0 | 0.0 | 0.0 |
| | SV = 1 - [IMA7_HUMAN] | | | | | |
| O60832-2 | Isoform 3 of H/ACA ribonucleoprotein complex subunit DKC1 OS = Homo sapiens | 0 | 0 | 0 | 0.0 | 0.0 |
| | OX = 9606 GN = DKC1 - [DKC1_HUMAN] | | | | | |
| O75037-3 | Isoform 3 of Kinesin-like protein KIF21B OS = Homo sapiens OX = 9606 | 0 | 0 | 0 | 0.0 | 0.0 |
| | GN = KIF21B - [KI21B_HUMAN] | | | | | |
| O75367-2 | Isoform 1 of Core histone macro-H2A.1 OS = Homo sapiens OX = 9606 | 0 | 0 | 0 | 0.0 | 0.0 |
| | GN = H2AFY - [H2AY_HUMAN] | | | | | |
| O75934 | Pre-mRNA-splicing factor SPF27 OS = Homo sapiens OX = 9606 GN = BCAS2 | 0 | 0 | 0 | 0.0 | 0.0 |
| | PE = 1 SV = 1 - [SPF27_HUMAN] | | | | | |
| O75962-5 | Isoform 5 of Triple functional domain protein OS = Homo sapiens | 0 | 0 | 0 | 0.0 | 0.0 |
| | OX = 9606 GN = TRIO - [TRIO_HUMAN] | | | | | |
| O95551 | Tyrosyl-DNA phosphodiesterase 2 OS = Homo sapiens OX = 9606 GN = TDP2 | 0 | 0 | 0 | 0.0 | 0.0 |
| | PE = 1 SV = 1 - [TYDP2_HUMAN] | | | | | |
| O95639-3 | Isoform 3 of Cleavage and polyadenylation specificity factor subunit 4 | 0 | 0 | 0 | 0.0 | 0.0 |
| | OS = Homo sapiens OX = 9606 GN = CPSF4 - [CPSF4_HUMAN] | | | | | |
| O95786-2 | Isoform 2 of Probable ATP-dependent RNA helicase DDX58 OS = Homo sapiens | 0 | 0 | 0 | 0.0 | 0.0 |
| | OX = 9606 GN = DDX58 - [DDX58_HUMAN] | | | | | |
| O96005-3 | Isoform 2 of Cleft lip and palate transmembrane protein 1 OS = | 0 | 0 | 0 | 0.0 | 0.0 |
| | Homo sapiens OX = 9606 GN = CLPTM1 - [CLPT1_HUMAN] | | | | | |
| P05386 | 60S acidic ribosomal protein P1 OS = Homo sapiens OX = 9606 GN = RPLP1 | 0 | 0 | 0 | 0.0 | 0.0 |
| | PE = 1 SV = 1 - [RLA1_HUMAN] | | | | | |
| P06702 | Protein S100-A9 OS = Homo sapiens OX = 9606 GN = S100A9 PE = 1 SV = | 0 | 0 | 0 | 0.0 | 0.0 |
| | 1 - [S10A9_HUMAN] | | | | | |
| P09914-2 | Isoform 2 of Interferon-induced protein with tetratricopeptide repeats 1 | 0 | 0 | 0 | 0.0 | 0.0 |
| | OS = Homo sapiens OX = 9606 GN = IFIT1 - [IFIT1_HUMAN] | | | | | |
| P11388 | DNA topoisomerase 2-alpha OS = Homo sapiens OX = 9606 GN = TOP2A PE = 1 | 0 | 0 | 0 | 0.0 | 0.0 |
| | SV = 3 - [TOP2A_HUMAN] | | | | | |
| P13807-2 | Isoform 2 of Glycogen [starch] synthase, muscle OS = Homo sapiens | 0 | 0 | 0 | 0.0 | 0.0 |
| | OX = 9606 GN = GYS1 - [GYS1_HUMAN] | | | | | |
| P14678-2 | Isoform SM-B of Small nuclear ribonucleoprotein-associated proteins B and | 0 | 0 | 0 | 0.0 | 0.0 |
| | B′ OS = Homo sapiens OX = 9606 GN = SNRPB - [RSMB_HUMAN] | | | | | |
| P17096 | High mobility group protein HMG-I/HMG-Y OS = Homo sapiens OX = 9606 GN = | 0 | 0 | 0 | 0.0 | 0.0 |
| | HMGA1 PE = 1 SV = 3 - [HMGA1_HUMAN] | | | | | |
| P17096-2 | Isoform HMG-Y of High mobility group protein HMG-I/HMG-Y OS = | 0 | 0 | 0 | 0.0 | 0.0 |
| | Homo sapiens OX = 9606 GN = HMGA1 - [HMGA1_HUMAN] | | | | | |
| P19474 | E3 ubiquitin-protein ligase TRIM21 OS = Homo sapiens OX = 9606 GN = | 0 | 0 | 0 | 0.0 | 0.0 |
| | TRIM21 PE = 1 SV = 1 - [RO52_HUMAN] | | | | | |
| P20592 | Interferon-induced GTP-binding protein Mx2 OS = Homo sapiens OX = | 0 | 0 | 0 | 0.0 | 0.0 |
| | 9606 GN = MX2 PE = 1 SV = 1 - [MX2_HUMAN] | | | | | |
| P22570-4 | Isoform 4 of NADPH: adrenodoxin oxidoreductase, mitochondrial OS = | 0 | 0 | 0 | 0.0 | 0.0 |
| | Homo sapiens OX = 9606 GN = FDXR - [ADRO_HUMAN] | | | | | |
| P22670 | MHC class Il regulatory factor RFX1 OS = Homo sapiens OX = 9606 | 0 | 0 | 0 | 0.0 | 0.0 |
| | GN = RFX1 PE = 1 SV = 2 - [RFX1_HUMAN] | | | | | |
| P22736 | Nuclear receptor subfamily 4 group A member 1 OS = Homo sapiens | 0 | 0 | 0 | 0.0 | 0.0 |
| | OX = 9606 GN = NR4A1 PE = 1 SV = 1 - [NR4A1_HUMAN] | | | | | |
| P23284 | Peptidyl-prolyl cis-trans isomerase B OS = Homo sapiens OX = 9606 | 0 | 0 | 0 | 0.0 | 0.0 |
| | GN = PPIB PE = 1 SV = 2 - [PPIB_HUMAN] | | | | | |
| P25098 | Beta-adrenergic receptor kinase 1 OS = Homo sapiens OX = 9606 | 0 | 0 | 0 | 0.0 | 0.0 |
| | GN = GRK2 PE = 1 SV = 2 - [ARBK1_HUMAN] | | | | | |
| P29728-2 | Isoform p69 of 2′-5′-oligoadenylate synthase 2 OS = Homo sapiens | 0 | 0 | 0 | 0.0 | 0.0 |
| | OX = 9606 GN = OAS2 - [OAS2_HUMAN] | | | | | |
| P31749-2 | Isoform 2 of RAC-alpha serine/threonine-protein kinase OS = Homo sapiens | 0 | 0 | 0 | 0.0 | 0.0 |
| | OX = 9606 GN = AKT1 - [AKT1_HUMAN] | | | | | |
| P32455 | Guanylate-binding protein 1 OS = Homo sapiens OX = 9606 GN = GBP1 PE = 1 | 0 | 0 | 0 | 0.0 | 0.0 |
| | SV = 2 - [GBP1_HUMAN] | | | | | |
| P32456 | Guanylate-binding protein 2 OS = Homo sapiens OX = 9606 GN = GBP2 PE = 1 | 0 | 0 | 0 | 0.0 | 0.0 |
| | SV = 3 - [GBP2_HUMAN] | | | | | |
| P39748-2 | Isoform FENMIT of Flap endonuclease 1 OS = Homo sapiens OX = 9606 | 0 | 0 | 0 | 0.0 | 0.0 |
| | GN = FEN1 - [FEN1_HUMAN] | | | | | |
| P42025 | Beta-centractin OS = Homo sapiens OX = 9606 GN = ACTR1B PE = 1 | 0 | 0 | 0 | 0.0 | 0.0 |
| | SV = 1 - [ACTY_HUMAN] | | | | | |
| P42696-2 | Isoform 2 of RNA-binding protein 34 OS = Homo sapiens OX = 9606 GN = | 0 | 0 | 0 | 0.0 | 0.0 |
| | RBM34 - [RBM34_HUMAN] | | | | | |
| P46060 | Ran GTPase-activating protein 1 OS = Homo sapiens OX = 9606 GN = RANGAP1 | 0 | 0 | 0 | 0.0 | 0.0 |
| | PE = 1 SV = 1 - [RAGP1_HUMAN] | | | | | |
| P48730-2 | Isoform 2 of Casein kinase I isoform delta OS = Homo sapiens OX = 9606 | 0 | 0 | 0 | 0.0 | 0.0 |
| | GN = CSNK1D - [KC1D_HUMAN] | | | | | |
| P50416-2 | Isoform 2 of Carnitine O-palmitoyltransferase 1, liver isoform OS = | 0 | 0 | 0 | 0.0 | 0.0 |
| | Homo sapiens OX = 9606 GN = CPT1A - [CPT1A_HUMAN] | | | | | |
| P50851-2 | Isoform 2 of Lipopolysaccharide-responsive and beige-like anchor protein OS = | 0 | 0 | 0 | 0.0 | 0.0 |
| | Homo sapiens OX = 9606 GN = LRBA - [LRBA_HUMAN] | | | | | |
| P52630-4 | Isoform 2 of Signal transducer and activator of transcription 2 OS = | 0 | 0 | 0 | 0.0 | 0.0 |
| | Homo sapiens OX = 9606 GN = STAT2 - [STAT2_HUMAN] | | | | | |
| P56524 | Histone deacetylase 4 OS = Homo sapiens OX = 9606 GN = HDAC4 PE = 1 | 0 | 0 | 0 | 0.0 | 0.0 |
| | SV = 3 - [HDAC4_HUMAN] | | | | | |
| P63167 | Dynein light chain 1, cytoplasmic OS = Homo sapiens OX = 9606 GN = DYNLL1 | 0 | 0 | 0 | 0.0 | 0.0 |
| | PE = 1 SV = 1 - [DYL1_HUMAN] | | | | | |
| P69905 | CRAP HBA_HUMAN Hemoglobin subunit alpha OS = Homo sapiens GN = HBA1 | 0 | 0 | 0 | 0.0 | 0.0 |
| | PE = 1 SV = 2 | | | | | |
| P85037 | Forkhead box protein K1 OS = Homo sapiens OX = 9606 GN = FOXK1 PE = 1 | 0 | 0 | 0 | 0.0 | 0.0 |
| | SV = 1 - [FOXK1_HUMAN] | | | | | |
| Q01167 | Forkhead box protein K2 OS = Homo sapiens OX = 9606 GN = FOXK2 PE = 1 | 0 | 0 | 0 | 0.0 | 0.0 |
| | SV = 3 - [FOXK2_HUMAN] | | | | | |
| Q01844-6 | Isoform 6 of RNA-binding protein EWS OS = Homo sapiens OX = 9606 | 0 | 0 | 0 | 0.0 | 0.0 |
| | GN = EWSR1 - [EWS_HUMAN] | | | | | |
| Q02880-2 | Isoform Beta-1 of DNA topoisomerase 2-beta OS = Homo sapiens OX = 9606 | 0 | 0 | 0 | 0.0 | 0.0 |
| | GN = TOP2B - [TOP2B_HUMAN] | | | | | |
| Q05086-2 | Isoform I of Ubiquitin-protein ligase E3A OS = Homo sapiens OX = 9606 | 0 | 0 | 0 | 0.0 | 0.0 |
| | GN = UBE3A - [UBE3A_HUMAN] | | | | | |
| Q05519-2 | Isoform 2 of Serine/arginine-rich splicing factor 11 OS = Homo sapiens | 0 | 0 | 0 | 0.0 | 0.0 |
| | OX = 9606 GN = SRSF11 - [SRS11_HUMAN] | | | | | |
| Q05655 | Protein kinase C delta type OS = Homo sapiens OX = 9606 GN = PRKCD | 0 | 0 | 0 | 0.0 | 0.0 |
| | PE = 1 SV = 2 - [KPCD_HUMAN] | | | | | |
| Q07021 | Complement component 1 Q subcomponent-binding protein, mitochondrial OS = | 0 | 0 | 0 | 0.0 | 0.0 |
| | [Homo sapiens OX = 9606 GN = C1QBP PE = 1 SV = 1 - 1QBP_HUMAN] | | | | | |
| Q07666-3 | Isoform 3 of KH domain-containing, RNA-binding, signal transduction- | 0 | 0 | 0 | 0.0 | 0.0 |
| | associated protein 1 OS = Homo sapiens OX = 9606 GN = KHDRBS1 - [KHDR1_HUMAN] | | | | | |
| Q10589-2 | Isoform 2 of Bone marrow stromal antigen 2 OS = Homo sapiens OX = 9606 | 0 | 0 | 0 | 0.0 | 0.0 |
| | GN = BST2 - [BST2_HUMAN] | | | | | |
| Q12888 | TP53-binding protein 1 OS = Homo sapiens OX = 9606 GN = TP53BP1 PE = 1 | 0 | 0 | 0 | 0.0 | 0.0 |
| | SV = 2 - [TP53B_HUMAN] | | | | | |
| Q12965 | Unconventional myosin-le OS = Homo sapiens OX = 9606 GN = MYO1E PE = 1 | 0 | 0 | 0 | 0.0 | 0.0 |
| | SV = 2 - [MYO1E_HUMAN] | | | | | |
| Q13107-2 | Isoform 2 of Ubiquitin carboxyl-terminal hydrolase 4 OS = Homo sapiens | 0 | 0 | 0 | 0.0 | 0.0 |
| | OX = 9606 GN = USP4 - [UBP4_HUMAN] | | | | | |
| Q13136-2 | Isoform 2 of Liprin-alpha-1 OS = Homo sapiens OX = 9606 GN = | 0 | 0 | 0 | 0.0 | 0.0 |
| | PPFIA1 - [LIPA1_HUMAN] | | | | | |
| Q13185 | Chromobox protein homolog 3 OS = Homo sapiens OX = 9606 GN = CBX3 | 0 | 0 | 0 | 0.0 | 0.0 |
| | PE = 1 SV = 4 - [CBX3_HUMAN] | | | | | |
| Q13242 | Serine/arginine-rich splicing factor 9 OS = Homo sapiens OX = 9606 | 0 | 0 | 0 | 0.0 | 0.0 |
| | GN = SRSF9 PE = 1 SV = 1 - [SRSF9_HUMAN] | | | | | |
| Q13325 | Interferon-induced protein with tetratricopeptide repeats 5 OS = | 0 | 0 | 0 | 0.0 | 0.0 |
| | Homo sapiens OX = 9606 GN = IFIT5 PE = 1 SV = 1 - [IFIT5_HUMAN] | | | | | |
| Q13370-2 | Isoform 2 of cGMP-inhibited 3′,5′-cyclic phosphodiesterase B OS = | 0 | 0 | 0 | 0.0 | 0.0 |
| | Homo sapiens OX = 9606 GN = PDE3B - [PDE3B_HUMAN] | | | | | |
| Q13616 | Cullin-1 OS = Homo sapiens OX = 9606 GN = CUL1 PE = 1 SV = 2 - [CUL1_HUMAN] | 0 | 0 | 0 | 0.0 | 0.0 |
| Q13671-2 | Isoform RIN1-delta of Ras and Rab interactor 1 OS = Homo sapiens | 0 | 0 | 0 | 0.0 | 0.0 |
| | OX = 9606 GN = RIN1 - [RIN1_HUMAN] | | | | | |
| Q14254 | Flotillin-2 OS = Homo sapiens OX = 9606 GN = FLOT2 PE = 1 | 0 | 0 | 0 | 0.0 | 0.0 |
| | SV = 2 - [FLOT2_HUMAN] | | | | | |
| Q15075 | Early endosome antigen 1 OS = Homo sapiens OX = 9606 GN = EEA1 PE = 1 | 0 | 0 | 0 | 0.0 | 0.0 |
| | SV = 2 - [EEA1_HUMAN] | | | | | |
| Q15287-3 | Isoform 3 of RNA-binding protein with serine-rich domain 1 OS = | 0 | 0 | 0 | 0.0 | 0.0 |
| | Homo sapiens OX = 9606 GN = RNPS1 - [RNPS1_HUMAN] | | | | | |
| Q15291-2 | Isoform 2 of Retinoblastoma-binding protein 5 OS = Homo sapiens | 0 | 0 | 0 | 0.0 | 0.0 |
| | OX = 9606 GN = RBBP5 - [RBBP5_HUMAN] | | | | | |
| Q15646-3 | Isoform 3 of 2′-5′-oligoadenylate synthase-like protein OS = | 0 | 0 | 0 | 0.0 | 0.0 |
| | Homo sapiens OX = 9606 GN = OASL - [OASL_HUMAN] | | | | | |
| Q15652-2 | Isoform 2 of Probable JmjC domain-containing histone demethylation | 0 | 0 | 0 | 0.0 | 0.0 |
| | protein 2C OS = Homo sapiens OX = 9606 GN = JMJD1C - [JHD2C_HUMAN] | | | | | |
| Q15750-2 | Isoform 2 of TGF-beta-activated kinase 1 and MAP3K7-binding | 0 | 0 | 0 | 0.0 | 0.0 |
| | protein 1 OS = Homo sapiens OX = 9606 GN = TAB1 - [TAB1_HUMAN] | | | | | |
| Q15776-2 | Isoform 2 of Zinc finger protein with KRAB and SCAN domains 8 | 0 | 0 | 0 | 0.0 | 0.0 |
| | OS = Homo sapiens OX = 9606 GN = ZKSCAN8 - [ZKSC8_HUMAN] | | | | | |
| Q32P41 | tRNA (guanine(37)-N1)-methyltransferase OS = Homo sapiens | 0 | 0 | 0 | 0.0 | 0.0 |
| | OX = 9606 GN = TRMT5 PE = 1 SV = 2 - [TRM5_HUMAN] | | | | | |
| Q3SY69 | Mitochondrial 10-formyltetrahydrofolate dehydrogenase OS = | 0 | 0 | 0 | 0.0 | 0.0 |
| | Homo sapiens OX = 9606 GN = ALDH1L2 PE = 1 SV = 2 - [AL1L2_HUMAN] | | | | | |
| Q460N5-4 | Isoform 4 of Protein mono-ADP-ribosyltransferase PARP14 OS = | 0 | 0 | 0 | 0.0 | 0.0 |
| | Homo sapiens OX = 9606 GN = PARP14 - [PAR14_HUMAN] | | | | | |
| Q53G44 | Interferon-induced protein 44-like OS = Homo sapiens OX = 9606 | 0 | 0 | 0 | 0.0 | 0.0 |
| | GN = IFI44L PE = 2 SV = 3 - [IF44L_HUMAN] | | | | | |
| Q5F1R6 | DnaJ homolog subfamily C member 21 OS = Homo sapiens OX = 9606 | 0 | 0 | 0 | 0.0 | 0.0 |
| | GN = DNAJC21 PE = 1 SV = 2 - [DJC21_HUMAN] | | | | | |
| Q5JTC6 | APC membrane recruitment protein 1 OS = Homo sapiens OX = 9606 | 0 | 0 | 0 | 0.0 | 0.0 |
| | GN = AMER1 PE = 1 SV = 2 - [AMER1_HUMAN] | | | | | |
| Q5K651 | Sterile alpha motif domain-containing protein 9 OS = Homo sapiens | 0 | 0 | 0 | 0.0 | 0.0 |
| | OX = 9606 GN = SAMD9 PE = 1 SV = 1 - [SAMD9_HUMAN] | | | | | |
| Q5MNZ6 | WD repeat domain phosphoinositide-interacting protein 3 OS = | 0 | 0 | 0 | 0.0 | 0.0 |
| | Homo sapiens OX = 9606 GN = WDR45B PE = 1 SV = 2 - [WIPI3_HUMAN] | | | | | |
| Q5QJE6 | Deoxynucleotidyltransferase terminal-interacting protein 2 OS = | 0 | 0 | 0 | 0.0 | 0.0 |
| | Homo sapiens OX = 9606 GN = DNTTIP2 PE = 1 SV = 2 - [TDIF2_HUMAN] | | | | | |
| Q5R3I4 | Tetratricopeptide repeat protein 38 OS = Homo sapiens OX = 9606 | 0 | 0 | 0 | 0.0 | 0.0 |
| | GN = TTC38 PE = 1 SV = 1 - [TTC38_HUMAN] | | | | | |
| Q5T749 | Keratinocyte proline-rich protein OS = Homo sapiens OX = 9606 | 0 | 0 | 0 | 0.0 | 0.0 |
| | GN = KPRP PE = 1 SV = 1 - [KPRP_HUMAN] | | | | | |
| Q5TA45-2 | Isoform 2 of Integrator complex subunit 11 OS = Homo sapiens | 0 | 0 | 0 | 0.0 | 0.0 |
| | OX = 9606 GN = INTS11 - [INT11_HUMAN] | | | | | |
| Q68DQ2-1 | Isoform 1 of Very large A-kinase anchor protein OS = Homo sapiens | 0 | 0 | 0 | 0.0 | 0.0 |
| | OX = 9606 GN = CRYBG3 - [CRBG3_HUMAN] | | | | | |
| Q69YN2-2 | Isoform 2 of CWF19-like protein 1 OS = Homo sapiens OX = 9606 | 0 | 0 | 0 | 0.0 | 0.0 |
| | GN = CWF19L1 - [C19L1_HUMAN] | | | | | |
| Q6P1M0 | Long-chain fatty acid transport protein 4 OS = Homo sapiens OX = | 0 | 0 | 0 | 0.0 | 0.0 |
| | 9606 GN = SLC27A4 PE = 1 SV = 1 - [S27A4_HUMAN] | | | | | |
| Q6P3W7 | SCY1-like protein 2 OS = Homo sapiens OX = 9606 GN = SCYL2 | 0 | 0 | 0 | 0.0 | 0.0 |
| | PE = 1 SV = 1 - [SCYL2_HUMAN] | | | | | |
| Q6P3X3 | Tetratricopeptide repeat protein 27 OS = Homo sapiens OX = 9606 | 0 | 0 | 0 | 0.0 | 0.0 |
| | GN = TTC27 PE = 1 SV = 1 - [TTC27_HUMAN] | | | | | |
| Q6P5R6 | 60S ribosomal protein L22-like 1 OS = Homo sapiens OX = 9606 GN = | 0 | 0 | 0 | 0.0 | 0.0 |
| | RPL22L1 PE = 1 SV = 2 - [RL22L_HUMAN] | | | | | |
| Q6PCE3 | Glucose 1,6-bisphosphate synthase OS = Homo sapiens OX = 9606 GN = | 0 | 0 | 0 | 0.0 | 0.0 |
| | PGM2L1 PE = 1 SV = 3 - [PGM2L_HUMAN] | | | | | |
| Q6PIW4-2 | Isoform 2 of Fidgetin-like protein 1 OS = Homo sapiens OX = 9606 | 0 | 0 | 0 | 0.0 | 0.0 |
| | GN = FIGNL1 - [FIGL1_HUMAN] | | | | | |
| Q6Q0C0-2 | Isoform 2 of E3 ubiquitin-protein ligase TRAF7 OS = Homo sapiens | 0 | 0 | 0 | 0.0 | 0.0 |
| | OX = 9606 GN = TRAF7 - [TRAF7_HUMAN] | | | | | |
| Q6R327 | Rapamycin-insensitive companion of mTOR OS = Homo sapiens OX = 9606 | 0 | 0 | 0 | 0.0 | 0.0 |
| | GN = RICTOR PE = 1 SV = 1 - [RICTR_HUMAN] | | | | | |
| Q6T4R5-2 | Isoform 2 of Nance-Horan syndrome protein OS = Homo sapiens | 0 | 0 | 0 | 0.0 | 0.0 |
| | OX = 9606 GN = NHS - [NHS_HUMAN] | | | | | |
| Q6WKZ4-3 | Isoform 2 of Rab11 family-interacting protein 1 OS = Homo sapiens | 0 | 0 | 0 | 0.0 | 0.0 |
| | OX = 9606 GN = RAB11FIP1 - [RFIP1_HUMAN] | | | | | |
| Q6ZSS7 | Major facilitator superfamily domain-containing protein 6 OS = | 0 | 0 | 0 | 0.0 | 0.0 |
| | Homo sapiens OX = 9606 GN = MFSD6 PE = 1 SV = 2 - [MFSD6_HUMAN] | | | | | |
| Q75N03-2 | Isoform 2 of E3 ubiquitin-protein ligase Hakai OS = Homo sapiens | 0 | 0 | 0 | 0.0 | 0.0 |
| | OX = 9606 GN = CBLL1 - [HAKAI_HUMAN] | | | | | |
| Q7Z4S6-6 | Isoform 6 of Kinesin-like protein KIF21A OS = Homo sapiens OX = 9606 | 0 | 0 | 0 | 0.0 | 0.0 |
| | GN = KIF21A - [KI21A_HUMAN] | | | | | |
| Q7Z7A3 | Cytoplasmic tRNA 2-thiolation protein 1 OS = Homo sapiens OX = 9606 | 0 | 0 | 0 | 0.0 | 0.0 |
| | GN = CTU1 PE = 1 SV = 1 - [CTU1_HUMAN] | | | | | |
| Q86TI2-4 | Isoform 3 of Dipeptidyl peptidase 9 OS = Homo sapiens OX = 9606 | 0 | 0 | 0 | 0.0 | 0.0 |
| | GN = DPP9 - [DPP9_HUMAN] | | | | | |
| Q86UE4 | Protein LYRIC OS = Homo sapiens OX = 9606 GN = MTDH PE = 1 | 0 | 0 | 0 | 0.0 | 0.0 |
| | SV = 2 - [LYRIC_HUMAN] | | | | | |
| Q86V21-2 | Isoform 2 of Acetoacetyl-CoA synthetase OS = Homo sapiens OX = 9606 | 0 | 0 | 0 | 0.0 | 0.0 |
| | GN = AACS - [AACS_HUMAN] | | | | | |
| Q86W50 | RNA N6-adenosine-methyltransferase METTL16 OS = Homo sapiens OX = 9606 | 0 | 0 | 0 | 0.0 | 0.0 |
| | GN = METTL16 PE = 1 SV = 2 - [MET16_HUMAN] | | | | | |
| Q86XZ4 | Spermatogenesis-associated serine-rich protein 2 OS = Homo sapiens | 0 | 0 | 0 | 0.0 | 0.0 |
| | OX = 9606 GN = SPATS2 PE = 1 SV = 1 - [SPAS2_HUMAN] | | | | | |
| Q86Y91-6 | Isoform 2 of Kinesin-like protein KIF18B OS = Homo sapiens OX = 9606 | 0 | 0 | 0 | 0.0 | 0.0 |
| | GN = KIF18B - [KI18B_HUMAN] | | | | | |
| Q86YQ8 | Copine-8 OS = Homo sapiens OX = 9606 GN = CPNE8 PE = 1 SV = 2 - [CPNE8_HUMAN] | 0 | 0 | 0 | 0.0 | 0.0 |
| Q8IUE6 | Histone H2A type 2-B OS = Homo sapiens OX = 9606 GN = HIST2H2AB PE = 1 | 0 | 0 | 0 | 0.0 | 0.0 |
| | SV = 3 - [H2A2B_HUMAN] | | | | | |
| Q8IVT5-2 | Isoform 2 of Kinase suppressor of Ras 1 OS = Homo sapiens OX = 9606 | 0 | 0 | 0 | 0.0 | 0.0 |
| | GN = KSR1 - [KSR1_HUMAN] | | | | | |
| Q8IWB1 | Inositol 1,4,5-trisphosphate receptor-interacting protein OS = Homo sapiens | 0 | 0 | 0 | 0.0 | 0.0 |
| | OX = 9606 GN = ITPRIP PE = 1 SV = 1 - [IPRI_HUMAN] | | | | | |
| Q8IY21 | Probable ATP-dependent RNA helicase DDX60 OS = Homo sapiens OX = 9606 | 0 | 0 | 0 | 0.0 | 0.0 |
| | GN = DDX60 PE = 1 SV = 3 - [DDX60_HUMAN] | | | | | |
| Q8N490-2 | Isoform 2 of Probable hydrolase PNKD OS = Homo sapiens OX = 9606 GN = | 0 | 0 | 0 | 0.0 | 0.0 |
| | PNKD - [PNKD_HUMAN] | | | | | |
| Q8N6R0-3 | Isoform 3 of eEF1A lysine and N-terminal methyltransferase OS = Homo sapiens | 0 | 0 | 0 | 0.0 | 0.0 |
| | OX = 9606 GN = EEF1AKNMT - [EFNMT_HUMAN] | | | | | |
| Q8N8S7-3 | Isoform 3 of Protein enabled homolog OS = Homo sapiens OX = 9606 | 0 | 0 | 0 | 0.0 | 0.0 |
| | GN = ENAH - [ENAH_HUMAN] | | | | | |
| Q8N9N7 | Leucine-rich repeat-containing protein 57 OS = Homo sapiens OX = 9606 | 0 | 0 | 0 | 0.0 | 0.0 |
| | GN = LRRC57 PE = 1 SV = 1 - [LRC57_HUMAN] | | | | | |
| Q8NB16-2 | Isoform 2 of Mixed lineage kinase domain-like protein OS = Homo sapiens | 0 | 0 | 0 | 0.0 | 0.0 |
| | OX = 9606 GN = MLKL - [MLKL_HUMAN] | | | | | |
| Q8NBJ5 | Procollagen galactosyltransferase 1 OS = Homo sapiens OX = 9606 GN = | 0 | 0 | 0 | 0.0 | 0.0 |
| | COLGALT1 PE = 1 SV = 1 - [GT251_HUMAN] | | | | | |
| Q8NBQ5 | Estradiol 17-beta-dehydrogenase 11 OS = Homo sapiens OX = 9606 GN = | 0 | 0 | 0 | 0.0 | 0.0 |
| | HSD17B11 PE = 1 SV = 3 - [DHB11_HUMAN] | | | | | |
| Q8NBX0 | Saccharopine dehydrogenase-like oxidoreductase OS = Homo sapiens | 0 | 0 | 0 | 0.0 | 0.0 |
| | OX = 9606 GN = SCCPDH PE = 1 SV = 1 - [SCPDL_HUMAN] | | | | | |
| Q8TB52 | F-box only protein 30 OS = Homo sapiens OX = 9606 GN = FBXO30 | 0 | 0 | 0 | 0.0 | 0.0 |
| | PE = 1 SV = 3 - [FBX30_HUMAN] | | | | | |
| Q8TC12 | Retinol dehydrogenase 11 OS = Homo sapiens OX = 9606 GN = RDH11 PE = 1 | 0 | 0 | 0 | 0.0 | 0.0 |
| | SV = 2 - [RDH11_HUMAN] | | | | | |
| Q8TCB0 | Interferon-induced protein 44 OS = Homo sapiens OX = 9606 GN = IFI44 PE = 2 | 0 | 0 | 0 | 0.0 | 0.0 |
| | SV = 2 - [IFI44_HUMAN] | | | | | |
| Q8TCS8 | Polyribonucleotide nucleotidyltransferase 1, mitochondrial OS = | 0 | 0 | 0 | 0.0 | 0.0 |
| | Homo sapiens OX = 9606 GN = PNPT1 PE = 1 SV = 2 - [PNPT1_HUMAN] | | | | | |
| Q8TEW0-9 | Isoform 9 of Partitioning defective 3 homolog OS = Homo sapiens | 0 | 0 | 0 | 0.0 | 0.0 |
| | OX = 9606 GN = PARD3 - [PARD3_HUMAN] | | | | | |
| Q8WUH6 | Transmembrane protein 263 OS = Homo sapiens OX = 9606 GN = TMEM263 | 0 | 0 | 0 | 0.0 | 0.0 |
| | PE = 1 SV = 1 - [TM263_HUMAN] | | | | | |
| Q8WVJ2 | NudC domain-containing protein 2 OS = Homo sapiens OX = 9606 GN = NUDCD2 | 0 | 0 | 0 | 0.0 | 0.0 |
| | PE = 1 SV = 1 - [NUDC2_HUMAN] | | | | | |
| Q8WVM8-2 | Isoform 2 of Sec1 family domain-containing protein 1 OS = Homo sapiens | 0 | 0 | 0 | 0.0 | 0.0 |
| | OX = 9606 GN = SCFD1 - [SCFD1_HUMAN] | | | | | |
| Q8WVY7 | Ubiquitin-like domain-containing CTD phosphatase 1 OS = Homo sapiens | 0 | 0 | 0 | 0.0 | 0.0 |
| | OX = 9606 GN = UBLCP1 PE = 1 SV = 2 - [UBCP1_HUMAN] | | | | | |
| Q8WWQ0 | PH-interacting protein OS = Homo sapiens OX = 9606 GN = PHIP PE = 1 | 0 | 0 | 0 | 0.0 | 0.0 |
| | SV = 2 - [PHIP_HUMAN] | | | | | |
| Q8WXA3-5 | Isoform 4 of RUN and FYVE domain-containing protein 2 OS = Homo sapiens | 0 | 0 | 0 | 0.0 | 0.0 |
| | OX = 9606 GN = RUFY2 - [RUFY2_HUMAN] | | | | | |
| Q8WXX5 | DnaJ homolog subfamily C member 9 OS = Homo sapiens OX = 9606 | 0 | 0 | 0 | 0.0 | 0.0 |
| | GN = DNAJC9 PE = 1 SV = 1 - [DNJC9_HUMAN] | | | | | |
| Q8WYP5 | Protein ELYS OS = Homo sapiens OX = 9606 GN = AHCTF1 PE = 1 | 0 | 0 | 0 | 0.0 | 0.0 |
| | SV = 3 - [ELYS_HUMAN] | | | | | |
| Q92552 | 28S ribosomal protein S27, mitochondrial OS = Homo sapiens OX = 9606 | 0 | 0 | 0 | 0.0 | 0.0 |
| | GN = MRPS27 PE = 1 SV = 3 - [RT27_HUMAN] | | | | | |
| Q92572 | AP-3 complex subunit sigma-1 OS = Homo sapiens OX = 9606 GN = AP3S1 | 0 | 0 | 0 | 0.0 | 0.0 |
| | PE = 1 SV = 1 - [AP3S1_HUMAN] | | | | | |
| Q92626 | Peroxidasin homolog OS = Homo sapiens OX = 9606 GN = PXDN PE = 1 | 0 | 0 | 0 | 0.0 | 0.0 |
| | SV = 2 - [PXDN_HUMAN] | | | | | |
| Q92985-2 | Isoform B of Interferon regulatory factor 7 OS = Homo sapiens | 0 | 0 | 0 | 0.0 | 0.0 |
| | OX = 9606 GN = IRF7 - [IRF7_HUMAN] | | | | | |
| Q969R5 | Lethal(3)malignant brain tumor-like protein 2 OS = Homo sapiens | 0 | 0 | 0 | 0.0 | 0.0 |
| | OX = 9606 GN = L3MBTL2 PE = 1 SV = 1 - [LMBL2_HUMAN] | | | | | |
| Q969X5-2 | Isoform 2 of Endoplasmic reticulum-Golgi intermediate compartment protein 1 | 0 | 0 | 0 | 0.0 | 0.0 |
| | OS = Homo sapiens OX = 9606 GN = ERGIC1 - [ERGI1_HUMAN] | | | | | |
| Q96B26 | Exosome complex component RRP43 OS = Homo sapiens OX = 9606 GN = | 0 | 0 | 0 | 0.0 | 0.0 |
| | EXOSC8 PE = 1 SV = 1 - [EXOS8_HUMAN] | | | | | |
| Q96BM9 | ADP-ribosylation factor-like protein 8A OS = Homo sapiens OX = | 0 | 0 | 0 | 0.0 | 0.0 |
| | 9606 GN = ARL8A PE = 1 SV = 1 - [ARL8A_HUMAN] | | | | | |
| Q96CU9-3 | Isoform 3 of FAD-dependent oxidoreductase domain-containing | 0 | 0 | 0 | 0.0 | 0.0 |
| | protein 1 OS = Homo sapiens OX = 9606 GN = FOXRED1 - [FXRD1_HUMAN] | | | | | |
| Q96D71-2 | Isoform 2 of RalBP1-associated Eps domain-containing protein 1 | 0 | 0 | 0 | 0.0 | 0.0 |
| | OS = Homo sapiens OX = 9606 GN = REPS1 - [REPS1_HUMAN] | | | | | |
| Q96GQ7 | Probable ATP-dependent RNA helicase DDX27 OS = Homo sapiens | 0 | 0 | 0 | 0.0 | 0.0 |
| | OX = 9606 GN = DDX27 PE = 1 SV = 2 - [DDX27_HUMAN] | | | | | |
| Q96H55-3 | Isoform 3 of Unconventional myosin-XIX OS = Homo sapiens | 0 | 0 | 0 | 0.0 | 0.0 |
| | OX = 9606 GN = MYO19 - [MYO19_HUMAN] | | | | | |
| Q96SI9-2 | Isoform 2 of Spermatid perinuclear RNA-binding protein OS = | 0 | 0 | 0 | 0.0 | 0.0 |
| | Homo sapiens OX = 9606 GN = STRBP - [STRBP_HUMAN] | | | | | |
| Q96ST3 | Paired amphipathic helix protein Sin3a OS = Homo sapiens OX = 9606 GN = SIN3A | 0 | 0 | 0 | 0.0 | 0.0 |
| | PE = 1 SV = 2 - [SIN3A_HUMAN] | | | | | |
| Q99590-2 | Isoform 2 of Protein SCAF11 OS = Homo sapiens OX = 9606 | 0 | 0 | 0 | 0.0 | 0.0 |
| | GN = SCAF11 - [SCAFB_HUMAN] | | | | | |
| Q9BSC4-2 | Isoform 2 of Nucleolar protein 10 OS = Homo sapiens | 0 | 0 | 0 | 0.0 | 0.0 |
| | OX = 9606 GN = NOL10 - [NOL10_HUMAN] | | | | | |
| Q9BT22 | Chitobiosyldiphosphodolichol beta-mannosyltransferase OS = | 0 | 0 | 0 | 0.0 | 0.0 |
| | Homo sapiens OX = 9606 GN = ALG1 PE = 1 SV = 2 - [ALG1_HUMAN] | | | | | |
| Q9BWT3-2 | Isoform 2 of Poly(A) polymerase gamma OS = Homo sapiens | 0 | 0 | 0 | 0.0 | 0.0 |
| | OX = 9606 GN = PAPOLG - [PAPOG_HUMAN] | | | | | |
| Q9BXB4 | Oxysterol-binding protein-related protein 11 OS = Homo sapiens OX = 9606 GN = OSBPL11 | 0 | 0 | 0 | 0.0 | 0.0 |
| | PE = 1 SV = 2 - [OSB11_HUMAN] | | | | | |
| Q9BYK8 | Helicase with zinc finger domain 2 OS = Homo sapiens OX = 9606 | 0 | 0 | 0 | 0.0 | 0.0 |
| | GN = HELZ2 PE = 1 SV = 6 - [HELZ2_HUMAN] | | | | | |
| Q9BYX4 | Interferon-induced helicase C domain-containing protein 1 | 0 | 0 | 0 | 0.0 | 0.0 |
| | OS = Homo sapiens OX = 9606 GN = IFIH1 PE = 1 SV = 3 - [IFIH1_HUMAN] | | | | | |
| Q9BZE9-4 | Isoform 4 of Tether containing UBX domain for GLUT4 OS = | 0 | 0 | 0 | 0.0 | 0.0 |
| | Homo sapiens OX = 9606 GN = ASPSCR1 - [ASPC1_HUMAN] | | | | | |
| Q9C0B5-2 | Isoform 2 of Palmitoyltransferase ZDHHC5 OS = Homo sapiens | 0 | 0 | 0 | 0.0 | 0.0 |
| | OX = 9606 GN = ZDHHC5 - [ZDHC5_HUMAN] | | | | | |
| Q9GZU8 | PSME3-interacting protein OS = Homo sapiens OX = 9606 GN = FAM192A | 0 | 0 | 0 | 0.0 | 0.0 |
| | PE = 1 SV = 1 - [PIP30_HUMAN] | | | | | |
| Q9GZY8-4 | Isoform 4 of Mitochondrial fission factor OS = Homo sapiens | 0 | 0 | 0 | 0.0 | 0.0 |
| | OX = 9606 GN = MFF - [MFF_HUMAN] | | | | | |
| Q9H000-2 | Isoform 2 of Probable E3 ubiquitin-protein ligase makorin-2 OS = | 0 | 0 | 0 | 0.0 | 0.0 |
| | Homo sapiens OX = 9606 GN = MKRN2 - [MKRN2_HUMAN] | | | | | |
| Q9H2P9-2 | Isoform 2 of Diphthine methyl ester synthase OS = Homo sapiens | 0 | 0 | 0 | 0.0 | 0.0 |
| | OX = 9606 GN = DPH5 - [DPH5_HUMAN] | | | | | |
| Q9H6F5 | Coiled-coil domain-containing protein 86 OS = Homo sapiens | 0 | 0 | 0 | 0.0 | 0.0 |
| | OX = 9606 GN = CCDC86 PE = 1 SV = 1 - [CCD86_HUMAN] | | | | | |
| Q9H6S1-3 | Isoform 2 of 5-azacytidine-induced protein 2 OS = | 0 | 0 | 0 | 0.0 | 0.0 |
| | Homo sapiens OX = 9606 GN = AZI2 - [AZI2_HUMAN] | | | | | |
| Q9H7U1-2 | Isoform 2 of Serine-rich coiled-coil domain-containing protein 2 | 0 | 0 | 0 | 0.0 | 0.0 |
| | OS = Homo sapiens OX = 9606 GN = CCSER2 - [CCSE2_HUMAN] | | | | | |
| Q9H8Y5 | Ankyrin repeat and zinc finger domain-containing protein 1 | 0 | 0 | 0 | 0.0 | 0.0 |
| | OS = Homo sapiens OX = 9606 GN = ANKZF1 PE = 1 SV = 1 - [ANKZ1_HUMAN] | | | | | |
| Q9H9F9 | Actin-related protein 5 OS = Homo sapiens OX = 9606 GN = ACTR5 | 0 | 0 | 0 | 0.0 | 0.0 |
| | PE = 1 SV = 2 - [ARP5_HUMAN] | | | | | |
| Q9HAU5 | Regulator of nonsense transcripts 2 OS = Homo sapiens OX = 9606 | 0 | 0 | 0 | 0.0 | 0.0 |
| | GN = UPF2 PE = 1 SV = 1 - [RENT2_HUMAN] | | | | | |
| Q9HC35 | Echinoderm microtubule-associated protein-like 4 OS = | 0 | 0 | 0 | 0.0 | 0.0 |
| | Homo sapiens OX = 9606 GN = EML4 PE = 1 SV = 3 - [EMAL4_HUMAN] | | | | | |
| Q9HCD5 | Nuclear receptor coactivator 5 OS = Homo sapiens OX = 9606 | 0 | 0 | 0 | 0.0 | 0.0 |
| | GN = NCOA5 PE = 1 SV = 2 - [NCOA5_HUMAN] | | | | | |
| Q9HCE1 | Helicase MOV-10 OS = Homo sapiens OX = 9606 GN = MOV10 | 0 | 0 | 0 | 0.0 | 0.0 |
| | PE = 1 SV = 2 - [MOV10_HUMAN] | | | | | |
| Q9NQ55-2 | Isoform 2 of Suppressor of SWI4 1 homolog OS = Homo sapiens | 0 | 0 | 0 | 0.0 | 0.0 |
| | OX = 9606 GN = PPAN - [SSF1_HUMAN] | | | | | |
| Q9NTX5-3 | Isoform 3 of Ethylmalonyl-CoA decarboxylase OS = Homo sapiens | 0 | 0 | 0 | 0.0 | 0.0 |
| | OX = 9606 GN = ECHDC1 - [ECHD1_HUMAN] | | | | | |
| Q9NV88-3 | Isoform 3 of Integrator complex subunit 9 OS = Homo sapiens | 0 | 0 | 0 | 0.0 | 0.0 |
| | OX = 9606 GN = INTS9 - [INT9_HUMAN] | | | | | |
| Q9NVH2-4 | Isoform 4 of Integrator complex subunit 7 OS = Homo sapiens | 0 | 0 | 0 | 0.0 | 0.0 |
| | OX = 9606 GN = INTS7 - [INT7_HUMAN] | | | | | |
| Q9NVJ2 | ADP-ribosylation factor-like protein 8B OS = Homo sapiens | 0 | 0 | 0 | 0.0 | 0.0 |
| | OX = 9606 GN = ARL8B PE = 1 SV = 1 - [ARL8B_HUMAN] | | | | | |
| Q9NX20 | 39S ribosomal protein L16, mitochondrial OS = Homo sapiens | 0 | 0 | 0 | 0.0 | 0.0 |
| | OX = 9606 GN = MRPL16 PE = 1 SV = 1 - [RM16_HUMAN] | | | | | |
| Q9P2E3-2 | Isoform 2 of NFX1-type zinc finger-containing protein 1 | 0 | 0 | 0 | 0.0 | 0.0 |
| | OS = Homo sapiens OX = 9606 GN = ZNFX1 - [ZNFX1_HUMAN] | | | | | |
| Q9UI10-3 | Isoform 3 of Translation initiation factor elF-2B subunit | 0 | 0 | 0 | 0.0 | 0.0 |
| | delta OS = Homo sapiens OX = 9606 GN = EIF2B4 - [EI2BD_HUMAN] | | | | | |
| Q9UIF8-4 | Isoform 4 of Bromodomain adjacent to zinc finger domain] | 0 | 0 | 0 | 0.0 | 0.0 |
| | protein 2B OS = Homo sapiens OX = 9606 GN = BAZ2B - [BAZ2B_HUMAN | | | | | |
| Q9UIG0-2 | Isoform 2 of Tyrosine-protein kinase BAZ1B OS = Homo sapiens | 0 | 0 | 0 | 0.0 | 0.0 |
| | OX = 9606 GN = BAZ1B - [BAZ1B_HUMAN] | | | | | |
| Q9UII4 | E3 ISG15 -- protein ligase HERC5 OS = Homo sapiens OX = 9606 | 0 | 0 | 0 | 0.0 | 0.0 |
| | GN = HERC5 PE = 1 SV = 2 - [HERC5_HUMAN] | | | | | |
| Q9UPP1-5 | Isoform 5 of Histone lysine demethylase PHF8 OS = | 0 | 0 | 0 | 0.0 | 0.0 |
| | Homo sapiens OX = 9606 GN = PHF8 - [PHF8_HUMAN] | | | | | |
| Q9UQR1 | Zinc finger protein 148 OS = Homo sapiens OX = 9606 GN = ZNF148 PE = 1 | 0 | 0 | 0 | 0.0 | 0.0 |
| | SV = 2 - [ZN148_HUMAN] | | | | | |
| Q9Y3Z3-4 | Isoform 4 of Deoxynucleoside triphosphate triphosphohydrolase | 0 | 0 | 0 | 0.0 | 0.0 |
| | SAMHD1 OS = Homo sapiens OX = 9606 GN = SAMHD1 - [SAMH1_HUMAN] | | | | | |
| Q9Y4F1 | FERM, ARHGEF and pleckstrin domain-containing protein 1 OS = Homo sapiens OX = 9606 | 0 | 0 | 0 | 0.0 | 0.0 |
| | GN = FARP1 PE = 1 SV = 1 - [FARP1_HUMAN] | | | | | |
| Q9Y4X5 | E3 ubiquitin-protein ligase ARIH1 OS = Homo sapiens OX = 9606 GN = ARIH1 PE = 1 | 0 | 0 | 0 | 0.0 | 0.0 |
| | SV = 2 - [ARI1_HUMAN] | | | | | |
| Q9Y6K5 | 2′-5′-oligoadenylate synthase 3 OS = Homo sapiens OX = 9606 GN = OAS3 PE = 1 | 0 | 0 | 0 | 0.0 | 0.0 |
| | SV = 3 - [OAS3_HUMAN] | | | | | |
| Q9Y6M0-3 | Isoform 3 of Testisin OS = Homo sapiens OX = 9606 GN = PRSS21 - [TEST_HUMAN] | 0 | 0 | 0 | 0.0 | 0.0 |

TABLE 11
SAINT C-Turbo vs. Control
Cterm Bait

| Prey | PreyGene | Spec | SpecSum | AvgSpec | ctrlCounts | AvgP | MaxP | TopoAvgP | TopoMaxP | SaintScore | logOddsScore | FoldChange | BFDR |
|---|---|---|---|---|---|---|---|---|---|---|---|---|---|
| Q9Y4E8 | USP15 | 59\|69\|61 | 189 | 63 | 4\|4\|7 | 1 | 1 | 1 | 1 | 1 | 52.07 | 12.6 | 0 |
| Q63HN8 | RNF213 | 439\|430\|464 | 1333 | 444.33 | 34\|39\|43 | 1 | 1 | 1 | 1 | 1 | 381.15 | 11.49 | 0 |
| Q9NQC7-2 | CYLD | 10\|7\|6 | 23 | 7.67 | 0\|0\|0 | 1 | 1 | 1 | 1 | 1 | 8.18 | 76.67 | 0 |
| P18031 | PTPN1 | 4\|5\|5 | 14 | 4.67 | 0\|0\|0 | 1 | 1 | 1 | 1 | 1 | 4.87 | 46.67 | 0 |
| Q13045-2 | FLII | 4\|4\|5 | 13 | 4.33 | 0\|0\|0 | 0.99 | 1 | 0.99 | 1 | 0.99 | 4.87 | 43.33 | 0 |
| Q9BVL4 | SELENOO | 3\|4\|4 | 11 | 3.67 | 0\|0\|0 | 0.98 | 0.99 | 0.98 | 0.99 | 0.98 | 3.12 | 36.67 | 0.01 |
| O95819-4 | MAP4K4 | 3\|4\|5 | 12 | 4 | 0\|0\|0 | 0.98 | 1 | 0.98 | 1 | 0.98 | 3.12 | 40 | 0 |
| P30837 | ALDH1B1 | 7\|3\|4 | 14 | 4.67 | 0\|0\|0 | 0.98 | 1 | 0.98 | 1 | 0.98 | 3.12 | 46.67 | 0 |
| Q9NZM1-2 | MYOF | 3\|2\|4 | 9 | 3 | 0\|0\|0 | 0.91 | 0.99 | 0.91 | 0.99 | 0.91 | 1.28 | 30 | 0.02 |
| Q9UM82 | SPATA2 | 10\|6\|14 | 30 | 10 | 2\|0\|0 | 0.91 | 1 | 0.91 | 1 | 0.91 | 1.05 | 15 | 0.03 |
| Q9NP81 | SARS2 | 2\|3\|4 | 9 | 3 | 0\|0\|0 | 0.91 | 0.99 | 0.91 | 0.99 | 0.91 | 1.28 | 30 | 0.02 |
| Q96A49 | SYAP1 | 5\|3\|2 | 10 | 3.33 | 0\|0\|0 | 0.91 | 1 | 0.91 | 1 | 0.91 | 1.28 | 33.33 | 0.01 |
| O15269 | SPTLC1 | 3\|2\|3 | 8 | 2.67 | 0\|0\|0 | 0.9 | 0.96 | 0.9 | 0.96 | 0.9 | 1.28 | 26.67 | 0.04 |
| Q17RY0-2 | CPEB4 | 2\|2\|4 | 8 | 2.67 | 0\|0\|0 | 0.85 | 0.99 | 0.85 | 0.99 | 0.85 | 1.28 | 26.67 | 0.04 |
| P46783 | RPS10 | 2\|2\|2 | 6 | 2 | 0\|0\|0 | 0.78 | 0.78 | 0.78 | 0.78 | 0.78 | 1.28 | 20 | 0.05 |
| P22061 | PCMT1 | 2\|2\|2 | 6 | 2 | 0\|0\|0 | 0.78 | 0.78 | 0.78 | 0.78 | 0.78 | 1.28 | 20 | 0.05 |
| O75794 | CDC123 | 2\|2\|2 | 6 | 2 | 0\|0\|0 | 0.78 | 0.78 | 0.78 | 0.78 | 0.78 | 1.28 | 20 | 0.05 |
| Q16850-2 | CYP51A1 | 4\|0\|4 | 8 | 2.67 | 0\|0\|0 | 0.66 | 0.99 | 0.66 | 0.99 | 0.66 | −3.26 | 26.67 | 0.08 |
| Q9UHD2 | TBK1 | 3\|0\|4 | 7 | 2.33 | 0\|0\|0 | 0.65 | 0.99 | 0.65 | 0.99 | 0.65 | −3.26 | 23.33 | 0.09 |
| Q92890 | UFD1 | 4\|0\|3 | 7 | 2.33 | 0\|0\|0 | 0.65 | 0.99 | 0.65 | 0.99 | 0.65 | −3.26 | 23.33 | 0.09 |
| Q8WUF5 | PPP1R13L | 2\|0\|4 | 6 | 2 | 0\|0\|0 | 0.59 | 0.99 | 0.59 | 0.99 | 0.59 | −3.26 | 20 | 0.13 |
| Q08AE8-2 | SPIRE1 | 6\|0\|2 | 8 | 2.67 | 0\|0\|0 | 0.59 | 1 | 0.59 | 1 | 0.59 | −3.26 | 26.67 | 0.12 |
| Q6YP21-3 | KYAT3 | 4\|0\|2 | 6 | 2 | 0\|0\|0 | 0.59 | 0.99 | 0.59 | 0.99 | 0.59 | −3.26 | 20 | 0.13 |
| Q2M218-2 | AAK1 | 4\|0\|2 | 6 | 2 | 0\|0\|0 | 0.59 | 0.99 | 0.59 | 0.99 | 0.59 | −3.26 | 20 | 0.13 |
| P50747 | HLCS | 0\|4\|2 | 6 | 2 | 0\|0\|0 | 0.59 | 0.99 | 0.59 | 0.99 | 0.59 | −3.26 | 20 | 0.13 |
| Q9Y6Y0 | IVNS1ABP | 2\|0\|4 | 6 | 2 | 0\|0\|0 | 0.59 | 0.99 | 0.59 | 0.99 | 0.59 | −3.26 | 20 | 0.13 |
| Q86SQ0-2 | PHLDB2 | 3\|2\|0 | 5 | 1.67 | 0\|0\|0 | 0.58 | 0.96 | 0.58 | 0.96 | 0.58 | −3.26 | 16.67 | 0.18 |
| Q9H267 | VPS33B | 3\|2\|0 | 5 | 1.67 | 0\|0\|0 | 0.58 | 0.96 | 0.58 | 0.96 | 0.58 | −3.26 | 16.67 | 0.18 |
| Q96IR7 | HPDL | 3\|0\|2 | 5 | 1.67 | 0\|0\|0 | 0.58 | 0.96 | 0.58 | 0.96 | 0.58 | −3.26 | 16.67 | 0.18 |
| A6NED2 | RCCD1 | 3\|0\|2 | 5 | 1.67 | 0\|0\|0 | 0.58 | 0.96 | 0.58 | 0.96 | 0.58 | −3.26 | 16.67 | 0.18 |
| P57737-3 | CORO7 | 0\|3\|2 | 5 | 1.67 | 0\|0\|0 | 0.58 | 0.96 | 0.58 | 0.96 | 0.58 | −3.26 | 16.67 | 0.18 |
| Q86YZ3 | HRNR | 2\|3\|0 | 5 | 1.67 | 0\|0\|0 | 0.58 | 0.96 | 0.58 | 0.96 | 0.58 | −3.26 | 16.67 | 0.18 |
| 075477 | ERLIN1 | 3\|2\|0 | 5 | 1.67 | 0\|0\|0 | 0.58 | 0.96 | 0.58 | 0.96 | 0.58 | −3.26 | 16.67 | 0.18 |
| O02750-2 | MAP2K1 | 3\|0\|2 | 5 | 1.67 | 0\|0\|0 | 0.58 | 0.96 | 0.58 | 0.96 | 0.58 | −3.26 | 16.67 | 0.18 |
| O43896 | KIF1C | 2\|3\|0 | 5 | 1.67 | 0\|0\|0 | 0.58 | 0.96 | 0.58 | 0.96 | 0.58 | −3.26 | 16.67 | 0.18 |
| E9PRG8 | C11ORF98 | 3\|0\|2 | 5 | 1.67 | 0\|0\|0 | 0.58 | 0.96 | 0.58 | 0.96 | 0.58 | −3.26 | 16.67 | 0.18 |
| P29373 | CRABP2 | 4\|7\|4 | 15 | 5 | 2\|0\|0 | 0.55 | 0.85 | 0.55 | 0.85 | 0.55 | −0.42 | 7.5 | 0.25 |
| Q9Y2U8 | LEMD3 | 0\|2\|2 | 4 | 1.33 | 0\|0\|0 | 0.52 | 0.78 | 0.52 | 0.78 | 0.52 | −3.26 | 13.33 | 0.26 |
| Q96T60 | PNKP | 2\|2\|0 | 4 | 1.33 | 0\|0\|0 | 0.52 | 0.78 | 0.52 | 0.78 | 0.52 | −3.26 | 13.33 | 0.26 |
| Q99456 | KRT12 | 2\|2\|0 | 4 | 1.33 | 0\|0\|0 | 0.52 | 0.78 | 0.52 | 0.78 | 0.52 | −3.26 | 13.33 | 0.26 |
| Q9GZS1 | POLR1E | 0\|2\|2 | 4 | 1.33 | 0\|0\|0 | 0.52 | 0.78 | 0.52 | 0.78 | 0.52 | −3.26 | 13.33 | 0.26 |
| Q96A35 | MRPL24 | 2\|0\|2 | 4 | 1.33 | 0\|0\|0 | 0.52 | 0.78 | 0.52 | 0.78 | 0.52 | −3.26 | 13.33 | 0.26 |
| P62258-2 | YWHAE | 2\|2\|0 | 4 | 1.33 | 0\|0\|0 | 0.52 | 0.78 | 0.52 | 0.78 | 0.52 | −3.26 | 13.33 | 0.26 |
| Q9NYL2 | MAP3K20 | 0\|2\|2 | 4 | 1.33 | 0\|0\|0 | 0.52 | 0.78 | 0.52 | 0.78 | 0.52 | −3.26 | 13.33 | 0.26 |
| Q53EP0 | FNDC3B | 2\|0\|2 | 4 | 1.33 | 0\|0\|0 | 0.52 | 0.78 | 0.52 | 0.78 | 0.52 | −3.26 | 13.33 | 0.26 |
| P31350 | RRM2 | 0\|2\|2 | 4 | 1.33 | 0\|0\|0 | 0.52 | 0.78 | 0.52 | 0.78 | 0.52 | −3.26 | 13.33 | 0.26 |
| P51114-3 | FXR1 | 2\|0\|2 | 4 | 1.33 | 0\|0\|0 | 0.52 | 0.78 | 0.52 | 0.78 | 0.52 | −3.26 | 13.33 | 0.26 |
| Q6P2H3-2 | CEP85 | 2\|4\|6 | 12 | 4 | 2\|0\|0 | 0.42 | 0.74 | 0.42 | 0.74 | 0.42 | −2.08 | 6 | 0.3 |
| P04259 | KRT6B | 52\|14\|8 | 74 | 24.67 | 14\|15\|17 | 0.33 | 1 | 0.33 | 1 | 0.33 | −46.96 | 1.61 | 0.32 |
| Q9UFC0 | LRWD1 | 0\|0\|4 | 4 | 1.33 | 0\|0\|0 | 0.33 | 0.99 | 0.33 | 0.99 | 0.33 | −3.26 | 13.33 | 0.34 |
| Q9NZJ0 | DTL | 0\|4\|0 | 4 | 1.33 | 0\|0\|0 | 0.33 | 0.99 | 0.33 | 0.99 | 0.33 | −3.26 | 13.33 | 0.34 |
| Q99439-2 | CNN2 | 4\|0\|0 | 4 | 1.33 | 0\|0\|0 | 0.33 | 0.99 | 0.33 | 0.99 | 0.33 | −3.26 | 13.33 | 0.34 |
| Q9H992-2 | 7-Mar | 0\|0\|4 | 4 | 1.33 | 0\|0\|0 | 0.33 | 0.99 | 0.33 | 0.99 | 0.33 | −3.26 | 13.33 | 0.34 |
| Q6N021 | TET2 | 0\|20\|0 | 20 | 6.67 | 0\|3\|0 | 0.33 | 1 | 0.33 | 1 | 0.33 | −5.85 | 6.67 | 0.33 |
| P02538 | KRT6A | 53\|15\|8 | 76 | 25.33 | 15\|15\|16 | 0.33 | 1 | 0.33 | 1 | 0.33 | −46.96 | 1.65 | 0.32 |
| Q92888-2 | ARHGEF1 | 0\|4\|0 | 4 | 1.33 | 0\|0\|0 | 0.33 | 0.99 | 0.33 | 0.99 | 0.33 | −3.26 | 13.33 | 0.34 |
| P08779 | KRT16 | 76\|13\|8 | 97 | 32.33 | 15\|23\|19 | 0.33 | 1 | 0.33 | 1 | 0.33 | −61.65 | 1.7 | 0.31 |
| Q5T7W7 | TSTD2 | 3\|0\|0 | 3 | 1 | 0\|0\|0 | 0.32 | 0.96 | 0.32 | 0.96 | 0.32 | −3.26 | 10 | 0.37 |
| Q6P1Q9 | METTL2B | 0\|3\|0 | 3 | 1 | 0\|0\|0 | 0.32 | 0.96 | 0.32 | 0.96 | 0.32 | −3.26 | 10 | 0.37 |
| O00443 | PIK3C2A | 0\|3\|0 | 3 | 1 | 0\|0\|0 | 0.32 | 0.96 | 0.32 | 0.96 | 0.32 | −3.26 | 10 | 0.37 |
| Q15814 | TBCC | 0\|3\|0 | 3 | 1 | 0\|0\|0 | 0.32 | 0.96 | 0.32 | 0.96 | 0.32 | −3.26 | 10 | 0.37 |
| Q9P2R3 | ANKFY1 | 3\|0\|0 | 3 | 1 | 0\|0\|0 | 0.32 | 0.96 | 0.32 | 0.96 | 0.32 | −3.26 | 10 | 0.37 |
| O95391 | SLU7 | 0\|3\|0 | 3 | 1 | 0\|0\|0 | 0.32 | 0.96 | 0.32 | 0.96 | 0.32 | −3.26 | 10 | 0.37 |
| Q9H1H9-3 | KIF13A | 0\|0\|3 | 3 | 1 | 0\|0\|0 | 0.32 | 0.96 | 0.32 | 0.96 | 0.32 | −3.26 | 10 | 0.37 |
| O60716-21 | CTNND1 | 0\|0\|3 | 3 | 1 | 0\|0\|0 | 0.32 | 0.96 | 0.32 | 0.96 | 0.32 | −3.26 | 10 | 0.37 |
| Q969S9-2 | GFM2 | 0\|0\|3 | 3 | 1 | 0\|0\|0 | 0.32 | 0.96 | 0.32 | 0.96 | 0.32 | −3.26 | 10 | 0.37 |
| P49674 | CSNK1E | 6\|0\|3 | 9 | 3 | 0\|2\|0 | 0.32 | 0.74 | 0.32 | 0.74 | 0.32 | −5.43 | 4.5 | 0.37 |
| Q9H0W8-2 | SMG9 | 0\|0\|3 | 3 | 1 | 0\|0\|0 | 0.32 | 0.96 | 0.32 | 0.96 | 0.32 | −3.26 | 10 | 0.37 |
| Q15070-2 | OXA1L | 0\|3\|0 | 3 | 1 | 0\|0\|0 | 0.32 | 0.96 | 0.32 | 0.96 | 0.32 | −3.26 | 10 | 0.37 |
| Q9BQL6 | FERMT1 | 0\|3\|0 | 3 | 1 | 0\|0\|0 | 0.32 | 0.96 | 0.32 | 0.96 | 0.32 | −3.26 | 10 | 0.37 |
| P18074-2 | ERCC2 | 0\|0\|3 | 3 | 1 | 0\|0\|0 | 0.32 | 0.96 | 0.32 | 0.96 | 0.32 | −3.26 | 10 | 0.37 |
| Q8NB46 | ANKRD52 | 0\|0\|3 | 3 | 1 | 0\|0\|0 | 0.32 | 0.96 | 0.32 | 0.96 | 0.32 | −3.26 | 10 | 0.37 |
| Q9UL54-2 | TAOK2 | 0\|0\|3 | 3 | 1 | 0\|0\|0 | 0.32 | 0.96 | 0.32 | 0.96 | 0.32 | −3.26 | 10 | 0.37 |
| O96013 | PAK4 | 3\|0\|0 | 3 | 1 | 0\|0\|0 | 0.32 | 0.96 | 0.32 | 0.96 | 0.32 | −3.26 | 10 | 0.37 |
| Q9BQ70 | TCF25 | 0\|0\|3 | 3 | 1 | 0\|0\|0 | 0.32 | 0.96 | 0.32 | 0.96 | 0.32 | −3.26 | 10 | 0.37 |
| P60228 | EIF3E | 3\|0\|0 | 3 | 1 | 0\|0\|0 | 0.32 | 0.96 | 0.32 | 0.96 | 0.32 | −3.26 | 10 | 0.37 |
| Q9Y217 | PIKFYVE | 3\|0\|0 | 3 | 1 | 0\|0\|0 | 0.32 | 0.96 | 0.32 | 0.96 | 0.32 | −3.26 | 10 | 0.37 |
| O75592-2 | MYCBP2 | 5\|2\|3 | 10 | 3.33 | 0\|2\|0 | 0.31 | 0.58 | 0.31 | 0.58 | 0.31 | −2.08 | 5 | 0.45 |
| P08240 | SRPRA | 5\|3\|2 | 10 | 3.33 | 2\|0\|0 | 0.31 | 0.58 | 0.31 | 0.58 | 0.31 | −2.08 | 5 | 0.45 |
| P08865 | RPSA | 4\|3\|3 | 10 | 3.33 | 0\|0\|2 | 0.29 | 0.4 | 0.29 | 0.4 | 0.29 | −1.21 | 5 | 0.45 |
| Q8WXG6-6 | MADD | 2\|0\|0 | 2 | 0.67 | 0\|0\|0 | 0.26 | 0.78 | 0.26 | 0.78 | 0.26 | −3.26 | 6.67 | 0.46 |
| Q01433-2 | AMPD2 | 2\|0\|0 | 2 | 0.67 | 0\|0\|0 | 0.26 | 0.78 | 0.26 | 0.78 | 0.26 | −3.26 | 6.67 | 0.46 |
| Q9UKL0 | RCOR1 | 0\|0\|2 | 2 | 0.67 | 0\|0\|0 | 0.26 | 0.78 | 0.26 | 0.78 | 0.26 | −3.26 | 6.67 | 0.46 |
| P49593-2 | PPM1F | 2\|0\|0 | 2 | 0.67 | 0\|0\|0 | 0.26 | 0.78 | 0.26 | 0.78 | 0.26 | −3.26 | 6.67 | 0.46 |
| Q9H8H0 | NOL11 | 0\|2\|0 | 2 | 0.67 | 0\|0\|0 | 0.26 | 0.78 | 0.26 | 0.78 | 0.26 | −3.26 | 6.67 | 0.46 |
| O75955-2 | FLOT1 | 0\|2\|0 | 2 | 0.67 | 0\|0\|0 | 0.26 | 0.78 | 0.26 | 0.78 | 0.26 | −3.26 | 6.67 | 0.46 |
| P41214 | EIF2D | 0\|2\|0 | 2 | 0.67 | 0\|0\|0 | 0.26 | 0.78 | 0.26 | 0.78 | 0.26 | −3.26 | 6.67 | 0.46 |
| A5YKK6 | CNOT1 | 2\|0\|0 | 2 | 0.67 | 0\|0\|0 | 0.26 | 0.78 | 0.26 | 0.78 | 0.26 | −3.26 | 6.67 | 0.46 |
| Q13555-10 | CAMK2G | 0\|0\|2 | 2 | 0.67 | 0\|0\|0 | 0.26 | 0.78 | 0.26 | 0.78 | 0.26 | −3.26 | 6.67 | 0.46 |
| Q05682-5 | CALD1 | 0\|0\|2 | 2 | 0.67 | 0\|0\|0 | 0.26 | 0.78 | 0.26 | 0.78 | 0.26 | −3.26 | 6.67 | 0.46 |
| Q9Y2Z4 | YARS2 | 0\|0\|2 | 2 | 0.67 | 0\|0\|0 | 0.26 | 0.78 | 0.26 | 0.78 | 0.26 | −3.26 | 6.67 | 0.46 |
| P51116 | FXR2 | 0\|2\|0 | 2 | 0.67 | 0\|0\|0 | 0.26 | 0.78 | 0.26 | 0.78 | 0.26 | −3.26 | 6.67 | 0.46 |
| Q9NVC6 | MED17 | 0\|2\|0 | 2 | 0.67 | 0\|0\|0 | 0.26 | 0.78 | 0.26 | 0.78 | 0.26 | −3.26 | 6.67 | 0.46 |
| Q9Y619 | SLC25A15 | 0\|0\|2 | 2 | 0.67 | 0\|0\|0 | 0.26 | 0.78 | 0.26 | 0.78 | 0.26 | −3.26 | 6.67 | 0.46 |
| Q8N726-2 | CDKN2A | 0\|2\|0 | 2 | 0.67 | 0\|0\|0 | 0.26 | 0.78 | 0.26 | 0.78 | 0.26 | −3.26 | 6.67 | 0.46 |
| Q96S44 | TP53RK | 2\|0\|0 | 2 | 0.67 | 0\|0\|0 | 0.26 | 0.78 | 0.26 | 0.78 | 0.26 | −3.26 | 6.67 | 0.46 |
| Q8WWC4 | MAIP1 | 0\|2\|0 | 2 | 0.67 | 0\|0\|0 | 0.26 | 0.78 | 0.26 | 0.78 | 0.26 | −3.26 | 6.67 | 0.46 |
| Q9C0J8 | WDR33 | 0\|0\|2 | 2 | 0.67 | 0\|0\|0 | 0.26 | 0.78 | 0.26 | 0.78 | 0.26 | −3.26 | 6.67 | 0.46 |
| Q15208 | STK38 | 0\|2\|0 | 2 | 0.67 | 0\|0\|0 | 0.26 | 0.78 | 0.26 | 0.78 | 0.26 | −3.26 | 6.67 | 0.46 |
| P78362 | SRPK2 | 0\|2\|0 | 2 | 0.67 | 0\|0\|0 | 0.26 | 0.78 | 0.26 | 0.78 | 0.26 | −3.26 | 6.67 | 0.46 |
| Q96R06 | SPAG5 | 2\|0\|0 | 2 | 0.67 | 0\|0\|0 | 0.26 | 0.78 | 0.26 | 0.78 | 0.26 | −3.26 | 6.67 | 0.46 |
| Q96RE7 | NACC1 | 0\|0\|2 | 2 | 0.67 | 0\|0\|0 | 0.26 | 0.78 | 0.26 | 0.78 | 0.26 | −3.26 | 6.67 | 0.46 |
| O14925 | TIMM23 | 0\|2\|0 | 2 | 0.67 | 0\|0\|0 | 0.26 | 0.78 | 0.26 | 0.78 | 0.26 | −3.26 | 6.67 | 0.46 |
| Q8N1G4 | LRRC47 | 0\|0\|2 | 2 | 0.67 | 0\|0\|0 | 0.26 | 0.78 | 0.26 | 0.78 | 0.26 | −3.26 | 6.67 | 0.46 |
| Q14116-2 | IL18 | 0\|2\|0 | 2 | 0.67 | 0\|0\|0 | 0.26 | 0.78 | 0.26 | 0.78 | 0.26 | −3.26 | 6.67 | 0.46 |
| Q96CB8 | INTS12 | 0\|2\|0 | 2 | 0.67 | 0\|0\|0 | 0.26 | 0.78 | 0.26 | 0.78 | 0.26 | −3.26 | 6.67 | 0.46 |
| O43852-5 | CALU | 0\|0\|2 | 2 | 0.67 | 0\|0\|0 | 0.26 | 0.78 | 0.26 | 0.78 | 0.26 | −3.26 | 6.67 | 0.46 |
| Q15036-2 | SNX17 | 2\|0\|0 | 2 | 0.67 | 0\|0\|0 | 0.26 | 0.78 | 0.26 | 0.78 | 0.26 | −3.26 | 6.67 | 0.46 |
| P50570-2 | DNM2 | 0\|2\|0 | 2 | 0.67 | 0\|0\|0 | 0.26 | 0.78 | 0.26 | 0.78 | 0.26 | −3.26 | 6.67 | 0.46 |
| Q96SU4-5 | OSBPL9 | 0\|0\|2 | 2 | 0.67 | 0\|0\|0 | 0.26 | 0.78 | 0.26 | 0.78 | 0.26 | −3.26 | 6.67 | 0.46 |
| Q9ULV4 | CORO1C | 2\|0\|0 | 2 | 0.67 | 0\|0\|0 | 0.26 | 0.78 | 0.26 | 0.78 | 0.26 | −3.26 | 6.67 | 0.46 |
| Q14106-2 | TOB2 | 0\|0\|2 | 2 | 0.67 | 0\|0\|0 | 0.26 | 0.78 | 0.26 | 0.78 | 0.26 | −3.26 | 6.67 | 0.46 |
| O60869-2 | EDF1 | 0\|0\|2 | 2 | 0.67 | 0\|0\|0 | 0.26 | 0.78 | 0.26 | 0.78 | 0.26 | −3.26 | 6.67 | 0.46 |
| P62857 | RPS28 | 0\|0\|2 | 2 | 0.67 | 0\|0\|0 | 0.26 | 0.78 | 0.26 | 0.78 | 0.26 | −3.26 | 6.67 | 0.46 |
| Q5VZL5-2 | ZMYM4 | 0\|0\|2 | 2 | 0.67 | 0\|0\|0 | 0.26 | 0.78 | 0.26 | 0.78 | 0.26 | −3.26 | 6.67 | 0.46 |
| Q86V81 | ALYREF | 2\|0\|0 | 2 | 0.67 | 0\|0\|0 | 0.26 | 0.78 | 0.26 | 0.78 | 0.26 | −3.26 | 6.67 | 0.46 |
| P02662 | P02662 | 2\|0\|0 | 2 | 0.67 | 0\|0\|0 | 0.26 | 0.78 | 0.26 | 0.78 | 0.26 | −3.26 | 6.67 | 0.46 |
| Q99497 | PARK7 | 0\|0\|2 | 2 | 0.67 | 0\|0\|0 | 0.26 | 0.78 | 0.26 | 0.78 | 0.26 | −3.26 | 6.67 | 0.46 |
| Q8ND56-3 | LSM14A | 2\|0\|0 | 2 | 0.67 | 0\|0\|0 | 0.26 | 0.78 | 0.26 | 0.78 | 0.26 | −3.26 | 6.67 | 0.46 |
| P17252 | PRKCA | 0\|0\|2 | 2 | 0.67 | 0\|0\|0 | 0.26 | 0.78 | 0.26 | 0.78 | 0.26 | −3.26 | 6.67 | 0.46 |
| Q9NX46 | ADPRHL2 | 2\|0\|0 | 2 | 0.67 | 0\|0\|0 | 0.26 | 0.78 | 0.26 | 0.78 | 0.26 | −3.26 | 6.67 | 0.46 |
| Q9BUZ4 | TRAF4 | 2\|0\|0 | 2 | 0.67 | 0\|0\|0 | 0.26 | 0.78 | 0.26 | 0.78 | 0.26 | −3.26 | 6.67 | 0.46 |
| Q15154-4 | PCM1 | 2\|0\|0 | 2 | 0.67 | 0\|0\|0 | 0.26 | 0.78 | 0.26 | 0.78 | 0.26 | −3.26 | 6.67 | 0.46 |
| Q9BUH8 | BEGAIN | 2\|0\|0 | 2 | 0.67 | 0\|0\|0 | 0.26 | 0.78 | 0.26 | 0.78 | 0.26 | −3.26 | 6.67 | 0.46 |
| Q8NF37 | LPCAT1 | 0\|0\|2 | 2 | 0.67 | 0\|0\|0 | 0.26 | 0.78 | 0.26 | 0.78 | 0.26 | −3.26 | 6.67 | 0.46 |
| Q9NZT1 | CALML5 | 2\|0\|0 | 2 | 0.67 | 0\|0\|0 | 0.26 | 0.78 | 0.26 | 0.78 | 0.26 | −3.26 | 6.67 | 0.46 |
| O15198-2 | SMAD9 | 2\|0\|0 | 2 | 0.67 | 0\|0\|0 | 0.26 | 0.78 | 0.26 | 0.78 | 0.26 | −3.26 | 6.67 | 0.46 |
| Q9UJK0 | TSR3 | 0\|2\|0 | 2 | 0.67 | 0\|0\|0 | 0.26 | 0.78 | 0.26 | 0.78 | 0.26 | −3.26 | 6.67 | 0.46 |
| Q9Y2S6 | TMA7 | 0\|0\|2 | 2 | 0.67 | 0\|0\|0 | 0.26 | 0.78 | 0.26 | 0.78 | 0.26 | −3.26 | 6.67 | 0.46 |
| Q9BT92 | TCHP | 0\|0\|2 | 2 | 0.67 | 0\|0\|0 | 0.26 | 0.78 | 0.26 | 0.78 | 0.26 | −3.26 | 6.67 | 0.46 |
| Q7L0Y3 | TRMT10C | 0\|0\|2 | 2 | 0.67 | 0\|0\|0 | 0.26 | 0.78 | 0.26 | 0.78 | 0.26 | −3.26 | 6.67 | 0.46 |
| P45973 | CBX5 | 2\|0\|0 | 2 | 0.67 | 0\|0\|0 | 0.26 | 0.78 | 0.26 | 0.78 | 0.26 | −3.26 | 6.67 | 0.46 |
| Q16881-5 | TXNRD1 | 2\|0\|0 | 2 | 0.67 | 0\|0\|0 | 0.26 | 0.78 | 0.26 | 0.78 | 0.26 | −3.26 | 6.67 | 0.46 |
| Q86VM9 | ZC3H18 | 0\|2\|0 | 2 | 0.67 | 0\|0\|0 | 0.26 | 0.78 | 0.26 | 0.78 | 0.26 | −3.26 | 6.67 | 0.46 |
| Q9H479 | FN3K | 0\|0\|2 | 2 | 0.67 | 0\|0\|0 | 0.26 | 0.78 | 0.26 | 0.78 | 0.26 | −3.26 | 6.67 | 0.46 |
| Q99805 | TM9SF2 | 2\|0\|0 | 2 | 0.67 | 0\|0\|0 | 0.26 | 0.78 | 0.26 | 0.78 | 0.26 | −3.26 | 6.67 | 0.46 |
| Q9UM00-1 | TMCO1 | 0\|2\|0 | 2 | 0.67 | 0\|0\|0 | 0.26 | 0.78 | 0.26 | 0.78 | 0.26 | −3.26 | 6.67 | 0.46 |
| Q13888 | GTF2H2 | 0\|0\|2 | 2 | 0.67 | 0\|0\|0 | 0.26 | 0.78 | 0.26 | 0.78 | 0.26 | −3.26 | 6.67 | 0.46 |
| Q5VYK3 | ECM29 | 0\|2\|0 | 2 | 0.67 | 0\|0\|0 | 0.26 | 0.78 | 0.26 | 0.78 | 0.26 | −3.26 | 6.67 | 0.46 |
| P06789 | P06789 | 2\|0\|0 | 2 | 0.67 | 0\|0\|0 | 0.26 | 0.78 | 0.26 | 0.78 | 0.26 | −3.26 | 6.67 | 0.46 |
| P06788 | P06788 | 0\|0\|2 | 2 | 0.67 | 0\|0\|0 | 0.26 | 0.78 | 0.26 | 0.78 | 0.26 | −3.26 | 6.67 | 0.46 |
| P29966 | MARCKS | 0\|0\|2 | 2 | 0.67 | 0\|0\|0 | 0.26 | 0.78 | 0.26 | 0.78 | 0.26 | −3.26 | 6.67 | 0.46 |
| Q6IN84 | MRM1 | 0\|0\|2 | 2 | 0.67 | 0\|0\|0 | 0.26 | 0.78 | 0.26 | 0.78 | 0.26 | −3.26 | 6.67 | 0.46 |
| Q9P210 | CPSF2 | 0\|2\|0 | 2 | 0.67 | 0\|0\|0 | 0.26 | 0.78 | 0.26 | 0.78 | 0.26 | −3.26 | 6.67 | 0.46 |
| P53814-5 | SMTN | 2\|0\|0 | 2 | 0.67 | 0\|0\|0 | 0.26 | 0.78 | 0.26 | 0.78 | 0.26 | −3.26 | 6.67 | 0.46 |
| Q13332-6 | PTPRS | 0\|0\|2 | 2 | 0.67 | 0\|0\|0 | 0.26 | 0.78 | 0.26 | 0.78 | 0.26 | −3.26 | 6.67 | 0.46 |
| O60256 | PRPSAP2 | 2\|0\|0 | 2 | 0.67 | 0\|0\|0 | 0.26 | 0.78 | 0.26 | 0.78 | 0.26 | −3.26 | 6.67 | 0.46 |
| P78312-4 | FAM193A | 0\|0\|2 | 2 | 0.67 | 0\|0\|0 | 0.26 | 0.78 | 0.26 | 0.78 | 0.26 | −3.26 | 6.67 | 0.46 |
| O43314-2 | PPIP5K2 | 2\|0\|0 | 2 | 0.67 | 0\|0\|0 | 0.26 | 0.78 | 0.26 | 0.78 | 0.26 | −3.26 | 6.67 | 0.46 |
| P38117 | ETFB | 2\|0\|0 | 2 | 0.67 | 0\|0\|0 | 0.26 | 0.78 | 0.26 | 0.78 | 0.26 | −3.26 | 6.67 | 0.46 |
| Q86VP6 | CAND1 | 2\|0\|0 | 2 | 0.67 | 0\|0\|0 | 0.26 | 0.78 | 0.26 | 0.78 | 0.26 | −3.26 | 6.67 | 0.46 |
| Q9NVZ3-4 | NECAP2 | 0\|0\|2 | 2 | 0.67 | 0\|0\|0 | 0.26 | 0.78 | 0.26 | 0.78 | 0.26 | −3.26 | 6.67 | 0.46 |
| Q7Z4G4-3 | TRMT11 | 0\|0\|2 | 2 | 0.67 | 0\|0\|0 | 0.26 | 0.78 | 0.26 | 0.78 | 0.26 | −3.26 | 6.67 | 0.46 |
| Q8WVX9 | FAR1 | 2\|0\|0 | 2 | 0.67 | 0\|0\|0 | 0.26 | 0.78 | 0.26 | 0.78 | 0.26 | −3.26 | 6.67 | 0.46 |
| P21281 | ATP6V1B2 | 2\|0\|0 | 2 | 0.67 | 0\|0\|0 | 0.26 | 0.78 | 0.26 | 0.78 | 0.26 | −3.26 | 6.67 | 0.46 |
| Q7L7X3-3 | TAOK1 | 0\|0\|2 | 2 | 0.67 | 0\|0\|0 | 0.26 | 0.78 | 0.26 | 0.78 | 0.26 | −3.26 | 6.67 | 0.46 |
| Q15058 | KIF14 | 2\|0\|0 | 2 | 0.67 | 0\|0\|0 | 0.26 | 0.78 | 0.26 | 0.78 | 0.26 | −3.26 | 6.67 | 0.46 |
| Q9BTL3 | FAM103A1 | 0\|0\|2 | 2 | 0.67 | 0\|0\|0 | 0.26 | 0.78 | 0.26 | 0.78 | 0.26 | −3.26 | 6.67 | 0.46 |
| Q5VST9-5 | OBSCN | 2\|0\|0 | 2 | 0.67 | 0\|0\|0 | 0.26 | 0.78 | 0.26 | 0.78 | 0.26 | −3.26 | 6.67 | 0.46 |
| P53582 | METAP1 | 0\|2\|0 | 2 | 0.67 | 0\|0\|0 | 0.26 | 0.78 | 0.26 | 0.78 | 0.26 | −3.26 | 6.67 | 0.46 |
| P08574 | CYC1 | 2\|0\|0 | 2 | 0.67 | 0\|0\|0 | 0.26 | 0.78 | 0.26 | 0.78 | 0.26 | −3.26 | 6.67 | 0.46 |
| O75616 | ERAL1 | 0\|0\|2 | 2 | 0.67 | 0\|0\|0 | 0.26 | 0.78 | 0.26 | 0.78 | 0.26 | −3.26 | 6.67 | 0.46 |
| P53680-2 | AP2S1 | 2\|0\|0 | 2 | 0.67 | 0\|0\|0 | 0.26 | 0.78 | 0.26 | 0.78 | 0.26 | −3.26 | 6.67 | 0.46 |
| Q03164-2 | KMT2A | 0\|0\|2 | 2 | 0.67 | 0\|0\|0 | 0.26 | 0.78 | 0.26 | 0.78 | 0.26 | −3.26 | 6.67 | 0.46 |
| Q15418-4 | RPS6KA1 | 2\|0\|0 | 2 | 0.67 | 0\|0\|0 | 0.26 | 0.78 | 0.26 | 0.78 | 0.26 | −3.26 | 6.67 | 0.46 |
| P49642 | PRIM1 | 0\|0\|2 | 2 | 0.67 | 0\|0\|0 | 0.26 | 0.78 | 0.26 | 0.78 | 0.26 | −3.26 | 6.67 | 0.46 |
| Q15437 | SEC23B | 0\|2\|0 | 2 | 0.67 | 0\|0\|0 | 0.26 | 0.78 | 0.26 | 0.78 | 0.26 | −3.26 | 6.67 | 0.46 |
| P16989-2 | YBX3 | 2\|0\|0 | 2 | 0.67 | 0\|0\|0 | 0.26 | 0.78 | 0.26 | 0.78 | 0.26 | −3.26 | 6.67 | 0.46 |
| Q8IZ73-2 | RPUSD2 | 0\|0\|2 | 2 | 0.67 | 0\|0\|0 | 0.26 | 0.78 | 0.26 | 0.78 | 0.26 | −3.26 | 6.67 | 0.46 |
| Q86W56 | PARG | 0\|2\|0 | 2 | 0.67 | 0\|0\|0 | 0.26 | 0.78 | 0.26 | 0.78 | 0.26 | −3.26 | 6.67 | 0.46 |
| P82912-2 | MRPS11 | 0\|0\|2 | 2 | 0.67 | 0\|0\|0 | 0.26 | 0.78 | 0.26 | 0.78 | 0.26 | −3.26 | 6.67 | 0.46 |
| P09429 | HMGB1 | 0\|0\|2 | 2 | 0.67 | 0\|0\|0 | 0.26 | 0.78 | 0.26 | 0.78 | 0.26 | −3.26 | 6.67 | 0.46 |
| Q8TCG1-2 | KIAA1524 | 0\|2\|0 | 2 | 0.67 | 0\|0\|0 | 0.26 | 0.78 | 0.26 | 0.78 | 0.26 | −3.26 | 6.67 | 0.46 |
| O15270 | SPTLC2 | 0\|2\|0 | 2 | 0.67 | 0\|0\|0 | 0.26 | 0.78 | 0.26 | 0.78 | 0.26 | −3.26 | 6.67 | 0.46 |
| Q9NYL2-2 | MAP3K20 | 0\|2\|0 | 2 | 0.67 | 0\|0\|0 | 0.26 | 0.78 | 0.26 | 0.78 | 0.26 | −3.26 | 6.67 | 0.46 |
| Q9BU76-4 | MMTAG2 | 0\|0\|2 | 2 | 0.67 | 0\|0\|0 | 0.26 | 0.78 | 0.26 | 0.78 | 0.26 | −3.26 | 6.67 | 0.46 |
| O43402 | EMC8 | 0\|2\|0 | 2 | 0.67 | 0\|0\|0 | 0.26 | 0.78 | 0.26 | 0.78 | 0.26 | −3.26 | 6.67 | 0.46 |
| Q92538-3 | GBF1 | 0\|0\|2 | 2 | 0.67 | 0\|0\|0 | 0.26 | 0.78 | 0.26 | 0.78 | 0.26 | −3.26 | 6.67 | 0.46 |
| Q6IAN0 | DHRS7B | 2\|0\|0 | 2 | 0.67 | 0\|0\|0 | 0.26 | 0.78 | 0.26 | 0.78 | 0.26 | −3.26 | 6.67 | 0.46 |
| Q86UL3 | GPAT4 | 0\|0\|2 | 2 | 0.67 | 0\|0\|0 | 0.26 | 0.78 | 0.26 | 0.78 | 0.26 | −3.26 | 6.67 | 0.46 |
| Q6P1N0-2 | CC2D1A | 2\|0\|0 | 2 | 0.67 | 0\|0\|0 | 0.26 | 0.78 | 0.26 | 0.78 | 0.26 | −3.26 | 6.67 | 0.46 |
| P35270 | SPR | 0\|2\|0 | 2 | 0.67 | 0\|0\|0 | 0.26 | 0.78 | 0.26 | 0.78 | 0.26 | −3.26 | 6.67 | 0.46 |
| O43294-2 | TGFB111 | 0\|2\|0 | 2 | 0.67 | 0\|0\|0 | 0.26 | 0.78 | 0.26 | 0.78 | 0.26 | −3.26 | 6.67 | 0.46 |
| P60660 | MYL6 | 3\|2\|4 | 9 | 3 | 2\|0\|0 | 0.25 | 0.4 | 0.25 | 0.4 | 0.25 | −2.08 | 4.5 | 0.62 |
| Q5SWA1 | PPP1R15B | 2\|3\|4 | 9 | 3 | 0\|2\|0 | 0.25 | 0.4 | 0.25 | 0.4 | 0.25 | −2.08 | 4.5 | 0.62 |
| Q9H425 | C1ORF198 | 3\|3\|3 | 9 | 3 | 0\|0\|2 | 0.23 | 0.23 | 0.23 | 0.23 | 0.23 | −1.21 | 4.5 | 0.62 |
| P61604 | HSPE1 | 3\|3\|3 | 9 | 3 | 0\|0\|2 | 0.23 | 0.23 | 0.23 | 0.23 | 0.23 | −1.21 | 4.5 | 0.62 |
| O60884 | DNAJA2 | 5\|0\|2 | 7 | 2.33 | 0\|0\|2 | 0.23 | 0.58 | 0.23 | 0.58 | 0.23 | −5.43 | 3.5 | 0.62 |
| A0FGR8-2 | ESYT2 | 0\|4\|3 | 7 | 2.33 | 0\|0\|2 | 0.21 | 0.4 | 0.21 | 0.4 | 0.21 | −5.43 | 3.5 | 0.62 |
| P49589-3 | CARS | 3\|0\|4 | 7 | 2.33 | 2\|0\|0 | 0.21 | 0.4 | 0.21 | 0.4 | 0.21 | −5.43 | 3.5 | 0.62 |
| Q12792-4 | TWF1 | 5\|3\|3 | 11 | 3.67 | 3\|0\|0 | 0.2 | 0.34 | 0.2 | 0.34 | 0.2 | −1.89 | 3.67 | 0.62 |
| P25789 | PSMA4 | 2\|3\|3 | 8 | 2.67 | 0\|0\|2 | 0.19 | 0.23 | 0.19 | 0.23 | 0.19 | −2.08 | 4 | 0.62 |
| P35222 | CTNNB1 | 2\|3\|3 | 8 | 2.67 | 0\|2\|0 | 0.19 | 0.23 | 0.19 | 0.23 | 0.19 | −2.08 | 4 | 0.62 |
| Q9UQ13-2 | SHOC2 | 2\|0\|4 | 6 | 2 | 2\|0\|0 | 0.17 | 0.4 | 0.17 | 0.4 | 0.17 | −5.43 | 3 | 0.62 |
| P43307 | SSR1 | 5\|0\|0 | 5 | 1.67 | 0\|2\|2 | 0.15 | 0.44 | 0.15 | 0.44 | 0.15 | −7.85 | 1.25 | 0.63 |
| Q15018 | ABRAXAS2 | 2\|0\|5 | 7 | 2.33 | 2\|2\|0 | 0.15 | 0.44 | 0.15 | 0.44 | 0.15 | −7.85 | 1.75 | 0.63 |
| O95486 | SEC24A | 2\|3\|2 | 7 | 2.33 | 2\|0\|0 | 0.15 | 0.23 | 0.15 | 0.23 | 0.15 | −2.08 | 3.5 | 0.63 |
| O95630-2 | STAMBP | 3\|3\|0 | 6 | 2 | 0\|0\|2 | 0.15 | 0.23 | 0.15 | 0.23 | 0.15 | −5.43 | 3 | 0.63 |
| P57678 | GEMIN4 | 5\|2\|0 | 7 | 2.33 | 0\|0\|3 | 0.13 | 0.34 | 0.13 | 0.34 | 0.13 | −5.85 | 2.33 | 0.63 |
| Q9UNL2 | SSR3 | 3\|3\|3 | 9 | 3 | 3\|0\|0 | 0.13 | 0.13 | 0.13 | 0.13 | 0.13 | −1.89 | 3 | 0.63 |
| P49840 | GSK3A | 4\|0\|3 | 7 | 2.33 | 0\|0\|3 | 0.12 | 0.24 | 0.12 | 0.24 | 0.12 | −5.85 | 2.33 | 0.63 |
| O00399 | DCTN6 | 0\|2\|3 | 5 | 1.67 | 0\|0\|2 | 0.11 | 0.23 | 0.11 | 0.23 | 0.11 | −5.43 | 2.5 | 0.63 |
| Q9HB19 | PLEKHA2 | 2\|2\|4 | 8 | 2.67 | 0\|0\|3 | 0.11 | 0.24 | 0.11 | 0.24 | 0.11 | −2.93 | 2.67 | 0.64 |
| O14757-2 | CHEK1 | 2\|0\|3 | 5 | 1.67 | 0\|0\|2 | 0.11 | 0.23 | 0.11 | 0.23 | 0.11 | −5.43 | 2.5 | 0.63 |
| Q04446 | GBE1 | 3\|2\|0 | 5 | 1.67 | 0\|2\|0 | 0.11 | 0.23 | 0.11 | 0.23 | 0.11 | −5.43 | 2.5 | 0.63 |
| Q9BYD3-2 | MRPL4 | 2\|0\|3 | 5 | 1.67 | 2\|0\|0 | 0.11 | 0.23 | 0.11 | 0.23 | 0.11 | −5.43 | 2.5 | 0.63 |
| Q5T7N3 | KANK4 | 5\|5\|4 | 14 | 4.67 | 0\|2\|3 | 0.11 | 0.14 | 0.11 | 0.14 | 0.11 | −3.02 | 2.8 | 0.65 |
| Q9Y3A4 | RRP7A | 0\|3\|2 | 5 | 1.67 | 2\|0\|0 | 0.11 | 0.23 | 0.11 | 0.23 | 0.11 | −5.43 | 2.5 | 0.63 |
| A8CG34 | POM121C | 3\|2\|0 | 5 | 1.67 | 0\|0\|2 | 0.11 | 0.23 | 0.11 | 0.23 | 0.11 | −5.43 | 2.5 | 0.63 |
| Q6ZNB6 | NFXL1 | 4\|3\|4 | 11 | 3.67 | 2\|0\|2 | 0.11 | 0.15 | 0.11 | 0.15 | 0.11 | −3.25 | 2.75 | 0.65 |
| P38606-2 | ATP6V1A | 0\|2\|3 | 5 | 1.67 | 2\|0\|0 | 0.11 | 0.23 | 0.11 | 0.23 | 0.11 | −5.43 | 2.5 | 0.63 |
| Q5TCZ1-3 | SH3PXD2A | 2\|0\|3 | 5 | 1.67 | 0\|0\|2 | 0.11 | 0.23 | 0.11 | 0.23 | 0.11 | −5.43 | 2.5 | 0.63 |
| O15460 | P4HA2 | 2\|0\|3 | 5 | 1.67 | 0\|2\|0 | 0.11 | 0.23 | 0.11 | 0.23 | 0.11 | −5.43 | 2.5 | 0.63 |
| Q95604 | HLA-C | 4\|2\|0 | 6 | 2 | 0\|3\|0 | 0.1 | 0.24 | 0.1 | 0.24 | 0.1 | −5.85 | 2 | 0.65 |
| P14923 | JUP | 8\|2\|2 | 12 | 4 | 3\|4\|0 | 0.09 | 0.27 | 0.09 | 0.27 | 0.09 | −7.98 | 1.71 | 0.65 |
| Q8IZT6-2 | ASPM | 0\|0\|3 | 3 | 1 | 0\|0\|2 | 0.08 | 0.23 | 0.08 | 0.23 | 0.08 | −5.43 | 1.5 | 0.66 |
| P49247 | RPIA | 0\|0\|3 | 3 | 1 | 2\|0\|0 | 0.08 | 0.23 | 0.08 | 0.23 | 0.08 | −5.43 | 1.5 | 0.66 |
| P01116-2 | KRAS | 5\|0\|0 | 5 | 1.67 | 0\|0\|4 | 0.08 | 0.24 | 0.08 | 0.24 | 0.08 | −7.33 | 1.25 | 0.65 |
| Q9UKK3 | PARP4 | 0\|0\|3 | 3 | 1 | 0\|0\|2 | 0.08 | 0.23 | 0.08 | 0.23 | 0.08 | −5.43 | 1.5 | 0.66 |
| Q8NEC7-3 | GSTCD | 0\|0\|3 | 3 | 1 | 2\|0\|0 | 0.08 | 0.23 | 0.08 | 0.23 | 0.08 | −5.43 | 1.5 | 0.66 |
| Q12968 | NFATC3 | 0\|0\|3 | 3 | 1 | 0\|2\|0 | 0.08 | 0.23 | 0.08 | 0.23 | 0.08 | −5.43 | 1.5 | 0.66 |
| Q15813 | TBCE | 3\|2\|2 | 7 | 2.33 | 0\|3\|0 | 0.08 | 0.13 | 0.08 | 0.13 | 0.08 | −2.93 | 2.33 | 0.66 |
| P42694 | HELZ | 2\|3\|2 | 7 | 2.33 | 3\|0\|0 | 0.08 | 0.13 | 0.08 | 0.13 | 0.08 | −2.93 | 2.33 | 0.66 |
| P51692 | STAT5B | 0\|0\|3 | 3 | 1 | 0\|0\|2 | 0.08 | 0.23 | 0.08 | 0.23 | 0.08 | −5.43 | 1.5 | 0.66 |
| Q9BYJ9 | YTHDF1 | 0\|4\|0 | 4 | 1.33 | 3\|0\|0 | 0.08 | 0.24 | 0.08 | 0.24 | 0.08 | −5.85 | 1.33 | 0.65 |
| Q99575 | POP1 | 0\|0\|3 | 3 | 1 | 2\|0\|0 | 0.08 | 0.23 | 0.08 | 0.23 | 0.08 | −5.43 | 1.5 | 0.66 |
| Q15650 | TRIP4 | 3\|0\|0 | 3 | 1 | 2\|0\|0 | 0.08 | 0.23 | 0.08 | 0.23 | 0.08 | −5.43 | 1.5 | 0.66 |
| P36871 | PGM1 | 8\|5\|4 | 17 | 5.67 | 4\|2\|2 | 0.08 | 0.23 | 0.08 | 0.23 | 0.08 | −6.42 | 2.13 | 0.65 |
| Q15477 | SKIV2L | 3\|0\|0 | 3 | 1 | 2\|0\|0 | 0.08 | 0.23 | 0.08 | 0.23 | 0.08 | −5.43 | 1.5 | 0.66 |
| Q61A86-2 | ELP | 0\|3\|0 | 3 | 1 | 0\|0\|2 | 0.08 | 0.23 | 0.08 | 0.23 | 0.08 | −5.43 | 1.5 | 0.66 |
| O15084 | ANKRD28 | 0\|3\|0 | 3 | 1 | 2\|0\|0 | 0.08 | 0.23 | 0.08 | 0.23 | 0.08 | −5.43 | 1.5 | 0.66 |
| P51812 | RPS6KA3 | 0\|4\|0 | 4 | 1.33 | 0\|0\|3 | 0.08 | 0.24 | 0.08 | 0.24 | 0.08 | −5.85 | 1.33 | 0.65 |
| O95861-4 | BPNT1 | 0\|0\|3 | 3 | 1 | 2\|0\|0 | 0.08 | 0.23 | 0.08 | 0.23 | 0.08 | −5.43 | 1.5 | 0.66 |
| Q9H583 | HEATR1 | 0\|3\|0 | 3 | 1 | 0\|0\|2 | 0.08 | 0.23 | 0.08 | 0.23 | 0.08 | −5.43 | 1.5 | 0.66 |
| 014744-4 | PRMT5 | 0\|0\|3 | 3 | 1 | 2\|0\|0 | 0.08 | 0.23 | 0.08 | 0.23 | 0.08 | −5.43 | 1.5 | 0.66 |
| Q9UIV1-2 | CNOT7 | 0\|3\|0 | 3 | 1 | 0\|2\|0 | 0.08 | 0.23 | 0.08 | 0.23 | 0.08 | −5.43 | 1.5 | 0.66 |
| Q5D862 | FLG2 | 0\|0\|5 | 5 | 1.67 | 0\|4\|0 | 0.08 | 0.24 | 0.08 | 0.24 | 0.08 | −7.33 | 1.25 | 0.65 |
| P99999 | CYCS | 0\|2\|2 | 4 | 1.33 | 0\|2\|0 | 0.07 | 0.11 | 0.07 | 0.11 | 0.07 | −5.43 | 2 | 0.68 |
| O60942 | RNGTT | 0\|2\|2 | 4 | 1.33 | 0\|0\|2 | 0.07 | 0.11 | 0.07 | 0.11 | 0.07 | −5.43 | 2 | 0.68 |
| O15357-2 | INPPL1 | 0\|2\|2 | 4 | 1.33 | 2\|0\|0 | 0.07 | 0.11 | 0.07 | 0.11 | 0.07 | −5.43 | 2 | 0.68 |
| Q16698-2 | DECR1 | 0\|2\|2 | 4 | 1.33 | 0\|0\|2 | 0.07 | 0.11 | 0.07 | 0.11 | 0.07 | −5.43 | 2 | 0.68 |
| Q9HCD6 | TANC2 | 2\|0\|2 | 4 | 1.33 | 2\|0\|0 | 0.07 | 0.11 | 0.07 | 0.11 | 0.07 | −5.43 | 2 | 0.68 |
| P10606 | COX5B | 2\|2\|0 | 4 | 1.33 | 0\|0\|2 | 0.07 | 0.11 | 0.07 | 0.11 | 0.07 | −5.43 | 2 | 0.68 |
| P78406 | RAE1 | 4\|2\|3 | 9 | 3 | 4\|0\|0 | 0.07 | 0.14 | 0.07 | 0.14 | 0.07 | −3.92 | 2.25 | 0.68 |
| P04083 | ANXA1 | 6\|5\|4 | 15 | 5 | 4\|2\|0 | 0.07 | 0.13 | 0.07 | 0.13 | 0.07 | −3.99 | 2.5 | 0.69 |
| Q86UU1-3 | PHLDB1 | 2\|0\|2 | 4 | 1.33 | 2\|0\|0 | 0.07 | 0.11 | 0.07 | 0.11 | 0.07 | −5.43 | 2 | 0.68 |
| Q9H6T3-2 | RPAP3 | 2\|0\|2 | 4 | 1.33 | 2\|0\|0 | 0.07 | 0.11 | 0.07 | 0.11 | 0.07 | −5.43 | 2 | 0.68 |
| P02452 | COL1A1 | 0\|2\|2 | 4 | 1.33 | 0\|2\|0 | 0.07 | 0.11 | 0.07 | 0.11 | 0.07 | −5.43 | 2 | 0.68 |
| Q9UK76 | JPT1 | 2\|0\|2 | 4 | 1.33 | 2\|0\|0 | 0.07 | 0.11 | 0.07 | 0.11 | 0.07 | −5.43 | 2 | 0.68 |
| Q8NFF5-3 | FLAD1 | 2\|0\|2 | 4 | 1.33 | 0\|2\|0 | 0.07 | 0.11 | 0.07 | 0.11 | 0.07 | −5.43 | 2 | 0.68 |
| P55735-2 | SEC13 | 2\|2\|0 | 4 | 1.33 | 0\|0\|2 | 0.07 | 0.11 | 0.07 | 0.11 | 0.07 | −5.43 | 2 | 0.68 |
| Q9H0S4 | DDX47 | 2\|3\|0 | 5 | 1.67 | 0\|3\|0 | 0.06 | 0.13 | 0.06 | 0.13 | 0.06 | −5.85 | 1.67 | 0.69 |
| O15460-2 | P4HA2 | 2\|0\|3 | 5 | 1.67 | 0\|3\|0 | 0.06 | 0.13 | 0.06 | 0.13 | 0.06 | −5.85 | 1.67 | 0.69 |
| Q53GA4 | PHLDA2 | 4\|2\|2 | 8 | 2.67 | 2\|2\|0 | 0.06 | 0.15 | 0.06 | 0.15 | 0.06 | −4.72 | 2 | 0.7 |
| Q8NC60 | NOA1 | 3\|2\|4 | 9 | 3 | 2\|2\|0 | 0.06 | 0.15 | 0.06 | 0.15 | 0.06 | −4.72 | 2.25 | 0.69 |
| Q15031 | LARS2 | 3\|3\|3 | 9 | 3 | 4\|0\|0 | 0.06 | 0.06 | 0.06 | 0.06 | 0.06 | −2.7 | 2.25 | 0.69 |
| Q6DKJ4-3 | NXN | 2\|4\|2 | 8 | 2.67 | 0\|2\|2 | 0.06 | 0.15 | 0.06 | 0.15 | 0.06 | −4.72 | 2 | 0.7 |
| P13798 | APEH | 0\|2\|3 | 5 | 1.67 | 3\|0\|0 | 0.06 | 0.13 | 0.06 | 0.13 | 0.06 | −5.85 | 1.67 | 0.69 |
| Q14558 | PRPSAP1 | 2\|4\|3 | 9 | 3 | 2\|0\|2 | 0.06 | 0.15 | 0.06 | 0.15 | 0.06 | −4.72 | 2.25 | 0.69 |
| P50750 | CDK9 | 3\|2\|0 | 5 | 1.67 | 0\|3\|0 | 0.06 | 0.13 | 0.06 | 0.13 | 0.06 | −5.85 | 1.67 | 0.69 |
| Q5SRE5 | NUP188 | 2\|5\|2 | 9 | 3 | 0\|2\|3 | 0.05 | 0.14 | 0.05 | 0.14 | 0.05 | −5.71 | 1.8 | 0.71 |
| O14976-2 | GAK | 0\|3\|5 | 8 | 2.67 | 3\|0\|2 | 0.05 | 0.14 | 0.05 | 0.14 | 0.05 | −9.18 | 1.6 | 0.7 |
| P29372-5 | MPG | 3\|6\|4 | 13 | 4.33 | 4\|2\|0 | 0.05 | 0.13 | 0.05 | 0.13 | 0.05 | −5.25 | 2.17 | 0.7 |
| Q8N543 | OGFOD1 | 4\|0\|2 | 6 | 2 | 2\|0\|2 | 0.05 | 0.15 | 0.05 | 0.15 | 0.05 | −7.85 | 1.5 | 0.7 |
| P14735 | IDE | 0\|2\|4 | 6 | 2 | 2\|0\|2 | 0.05 | 0.15 | 0.05 | 0.15 | 0.05 | −7.85 | 1.5 | 0.7 |
| Q9HAH7 | FBRS | 2\|2\|2 | 6 | 2 | 0\|3\|0 | 0.05 | 0.05 | 0.05 | 0.05 | 0.05 | −2.93 | 2 | 0.7 |
| P45974-2 | USP5 | 6\|4\|4 | 14 | 4.67 | 4\|2\|0 | 0.05 | 0.13 | 0.05 | 0.13 | 0.05 | −3.99 | 2.33 | 0.7 |
| Q92598-2 | HSPH1 | 2\|2\|5 | 9 | 3 | 0\|5\|0 | 0.05 | 0.14 | 0.05 | 0.14 | 0.05 | −5.01 | 1.8 | 0.7 |
| Q14974 | KPNB1 | 0\|2\|4 | 6 | 2 | 2\|2\|0 | 0.05 | 0.15 | 0.05 | 0.15 | 0.05 | −7.85 | 1.5 | 0.7 |
| Q7Z2E3-7 | APTX | 0\|0\|3 | 3 | 1 | 3\|0\|0 | 0.04 | 0.13 | 0.04 | 0.13 | 0.04 | −5.85 | 1 | 0.71 |
| P61421 | ATP6V0D1 | 0\|2\|0 | 2 | 0.67 | 0\|2\|0 | 0.04 | 0.11 | 0.04 | 0.11 | 0.04 | −5.43 | 1 | 0.71 |
| Q9P0U3-2 | SENP1 | 2\|0\|0 | 2 | 0.67 | 2\|0\|0 | 0.04 | 0.11 | 0.04 | 0.11 | 0.04 | −5.43 | 1 | 0.71 |
| Q04726-2 | TLE3 | 0\|2\|0 | 2 | 0.67 | 0\|2\|0 | 0.04 | 0.11 | 0.04 | 0.11 | 0.04 | −5.43 | 1 | 0.71 |
| Q9Y311 | FBXO7 | 0\|0\|2 | 2 | 0.67 | 2\|0\|0 | 0.04 | 0.11 | 0.04 | 0.11 | 0.04 | −5.43 | 1 | 0.71 |
| Q8TCJ2 | STT3B | 2\|0\|0 | 2 | 0.67 | 0\|0\|2 | 0.04 | 0.11 | 0.04 | 0.11 | 0.04 | −5.43 | 1 | 0.71 |
| P62633-2 | CNBP | 0\|0\|3 | 3 | 1 | 3\|0\|0 | 0.04 | 0.13 | 0.04 | 0.13 | 0.04 | −5.85 | 1 | 0.71 |
| P13674-3 | P4HA1 | 3\|7\|6 | 16 | 5.33 | 2\|3\|3 | 0.04 | 0.08 | 0.04 | 0.08 | 0.04 | −7.86 | 2 | 0.75 |
| Q9NPI6-2 | DCP1A | 3\|0\|0 | 3 | 1 | 3\|0\|0 | 0.04 | 0.13 | 0.04 | 0.13 | 0.04 | −5.85 | 1 | 0.71 |
| Q12769 | NUP160 | 0\|2\|0 | 2 | 0.67 | 0\|2\|0 | 0.04 | 0.11 | 0.04 | 0.11 | 0.04 | −5.43 | 1 | 0.71 |
| P25325 | MPST | 2\|0\|0 | 2 | 0.67 | 0\|0\|2 | 0.04 | 0.11 | 0.04 | 0.11 | 0.04 | −5.43 | 1 | 0.71 |
| O75319 | DUSP11 | 0\|2\|0 | 2 | 0.67 | 0\|2\|0 | 0.04 | 0.11 | 0.04 | 0.11 | 0.04 | −5.43 | 1 | 0.71 |
| Q13625-2 | TP53BP2 | 2\|0\|0 | 2 | 0.67 | 2\|0\|0 | 0.04 | 0.11 | 0.04 | 0.11 | 0.04 | −5.43 | 1 | 0.71 |
| P05091-2 | ALDH2 | 0\|0\|2 | 2 | 0.67 | 0\|2\|0 | 0.04 | 0.11 | 0.04 | 0.11 | 0.04 | −5.43 | 1 | 0.71 |
| P61163 | ACTR1A | 2\|0\|0 | 2 | 0.67 | 0\|0\|2 | 0.04 | 0.11 | 0.04 | 0.11 | 0.04 | −5.43 | 1 | 0.71 |
| Q9GZT9-2 | EGLN1 | 0\|2\|0 | 2 | 0.67 | 0\|0\|2 | 0.04 | 0.11 | 0.04 | 0.11 | 0.04 | −5.43 | 1 | 0.71 |
| O60573-2 | EIF4E2 | 0\|0\|2 | 2 | 0.67 | 2\|0\|0 | 0.04 | 0.11 | 0.04 | 0.11 | 0.04 | −5.43 | 1 | 0.71 |
| Q14669-4 | TRIP12 | 2\|0\|0 | 2 | 0.67 | 2\|0\|0 | 0.04 | 0.11 | 0.04 | 0.11 | 0.04 | −5.43 | 1 | 0.71 |
| Q96125 | RBM17 | 0\|2\|0 | 2 | 0.67 | 2\|0\|0 | 0.04 | 0.11 | 0.04 | 0.11 | 0.04 | −5.43 | 1 | 0.71 |
| O95373 | IPO7 | 2\|0\|0 | 2 | 0.67 | 0\|0\|2 | 0.04 | 0.11 | 0.04 | 0.11 | 0.04 | −5.43 | 1 | 0.71 |
| O00541-2 | PES1 | 0\|2\|0 | 2 | 0.67 | 0\|2\|0 | 0.04 | 0.11 | 0.04 | 0.11 | 0.04 | −5.43 | 1 | 0.71 |
| P78318 | IGBP1 | 0\|0\|2 | 2 | 0.67 | 0\|0\|2 | 0.04 | 0.11 | 0.04 | 0.11 | 0.04 | −5.43 | 1 | 0.71 |
| Q5JTV8 | TOR1AIP1 | 0\|0\|2 | 2 | 0.67 | 2\|0\|0 | 0.04 | 0.11 | 0.04 | 0.11 | 0.04 | −5.43 | 1 | 0.71 |
| Q9H4A4 | RNPEP | 0\|2\|0 | 2 | 0.67 | 0\|0\|2 | 0.04 | 0.11 | 0.04 | 0.11 | 0.04 | −5.43 | 1 | 0.71 |
| P25490 | YY1 | 2\|0\|0 | 2 | 0.67 | 0\|2\|0 | 0.04 | 0.11 | 0.04 | 0.11 | 0.04 | −5.43 | 1 | 0.71 |
| P48163-2 | ME1 | 0\|0\|2 | 2 | 0.67 | 0\|2\|0 | 0.04 | 0.11 | 0.04 | 0.11 | 0.04 | −5.43 | 1 | 0.71 |
| Q9NUL7 | DDX28 | 0\|0\|2 | 2 | 0.67 | 2\|0\|0 | 0.04 | 0.11 | 0.04 | 0.11 | 0.04 | −5.43 | 1 | 0.71 |
| Q02413 | DSG1 | 2\|0\|0 | 2 | 0.67 | 0\|2\|0 | 0.04 | 0.11 | 0.04 | 0.11 | 0.04 | −5.43 | 1 | 0.71 |
| Q15555-4 | MAPRE2 | 0\|0\|2 | 2 | 0.67 | 0\|0\|2 | 0.04 | 0.11 | 0.04 | 0.11 | 0.04 | −5.43 | 1 | 0.71 |
| Q8NBT2-2 | SPC24 | 2\|0\|0 | 2 | 0.67 | 0\|0\|2 | 0.04 | 0.11 | 0.04 | 0.11 | 0.04 | −5.43 | 1 | 0.71 |
| Q96KP1 | EXOC2 | 0\|2\|0 | 2 | 0.67 | 0\|2\|0 | 0.04 | 0.11 | 0.04 | 0.11 | 0.04 | −5.43 | 1 | 0.71 |
| P08134 | RHOC | 0\|0\|2 | 2 | 0.67 | 0\|0\|2 | 0.04 | 0.11 | 0.04 | 0.11 | 0.04 | −5.43 | 1 | 0.71 |
| P33981-2 | TTK | 6\|2\|6 | 14 | 4.67 | 2\|0\|5 | 0.04 | 0.06 | 0.04 | 0.06 | 0.04 | −7.81 | 2 | 0.71 |
| Q9BZV1-2 | UBXN6 | 0\|2\|0 | 2 | 0.67 | 0\|0\|2 | 0.04 | 0.11 | 0.04 | 0.11 | 0.04 | −5.43 | 1 | 0.71 |
| O75530-3 | EED | 0\|2\|0 | 2 | 0.67 | 2\|0\|0 | 0.04 | 0.11 | 0.04 | 0.11 | 0.04 | −5.43 | 1 | 0.71 |
| Q8N1N4 | KRT78 | 2\|0\|0 | 2 | 0.67 | 2\|0\|0 | 0.04 | 0.11 | 0.04 | 0.11 | 0.04 | −5.43 | 1 | 0.71 |
| Q8NEZ5 | FBXO22 | 2\|0\|0 | 2 | 0.67 | 2\|0\|0 | 0.04 | 0.11 | 0.04 | 0.11 | 0.04 | −5.43 | 1 | 0.71 |
| Q9NWT8 | AURKAIP1 | 0\|0\|3 | 3 | 1 | 3\|0\|0 | 0.04 | 0.13 | 0.04 | 0.13 | 0.04 | −5.85 | 1 | 0.71 |
| Q8NBM4 | UBAC2 | 0\|2\|0 | 2 | 0.67 | 2\|0\|0 | 0.04 | 0.11 | 0.04 | 0.11 | 0.04 | −5.43 | 1 | 0.71 |
| Q86WB0 | ZC3HC1 | 2\|0\|0 | 2 | 0.67 | 0\|0\|2 | 0.04 | 0.11 | 0.04 | 0.11 | 0.04 | −5.43 | 1 | 0.71 |
| Q9Y673-2 | ALG5 | 0\|0\|2 | 2 | 0.67 | 0\|0\|2 | 0.04 | 0.11 | 0.04 | 0.11 | 0.04 | −5.43 | 1 | 0.71 |
| Q9GZZ9 | UBA5 | 0\|2\|0 | 2 | 0.67 | 0\|2\|0 | 0.04 | 0.11 | 0.04 | 0.11 | 0.04 | −5.43 | 1 | 0.71 |
| Q9C0C7-4 | AMBRA1 | 0\|2\|0 | 2 | 0.67 | 2\|0\|0 | 0.04 | 0.11 | 0.04 | 0.11 | 0.04 | −5.43 | 1 | 0.71 |
| O00159-2 | MYO1C | 2\|0\|0 | 2 | 0.67 | 2\|0\|0 | 0.04 | 0.11 | 0.04 | 0.11 | 0.04 | −5.43 | 1 | 0.71 |
| Q86Y07-4 | VRK2 | 0\|0\|2 | 2 | 0.67 | 0\|2\|0 | 0.04 | 0.11 | 0.04 | 0.11 | 0.04 | −5.43 | 1 | 0.71 |
| P35611-2 | ADD1 | 0\|0\|2 | 2 | 0.67 | 2\|0\|0 | 0.04 | 0.11 | 0.04 | 0.11 | 0.04 | −5.43 | 1 | 0.71 |
| P06730 | EIF4E | 0\|0\|2 | 2 | 0.67 | 0\|2\|0 | 0.04 | 0.11 | 0.04 | 0.11 | 0.04 | −5.43 | 1 | 0.71 |
| Q96NW4 | ANKRD27 | 0\|0\|2 | 2 | 0.67 | 2\|0\|0 | 0.04 | 0.11 | 0.04 | 0.11 | 0.04 | −5.43 | 1 | 0.71 |
| Q7L1Q6-2 | BZW1 | 2\|0\|0 | 2 | 0.67 | 0\|2\|0 | 0.04 | 0.11 | 0.04 | 0.11 | 0.04 | −5.43 | 1 | 0.71 |
| P00492 | HPRT1 | 0\|0\|2 | 2 | 0.67 | 2\|0\|0 | 0.04 | 0.11 | 0.04 | 0.11 | 0.04 | −5.43 | 1 | 0.71 |
| P49590 | HARS2 | 0\|0\|2 | 2 | 0.67 | 2\|0\|0 | 0.04 | 0.11 | 0.04 | 0.11 | 0.04 | −5.43 | 1 | 0.71 |
| P27105 | STOM | 2\|0\|0 | 2 | 0.67 | 0\|0\|2 | 0.04 | 0.11 | 0.04 | 0.11 | 0.04 | −5.43 | 1 | 0.71 |
| O95677-5 | EYA4 | 2\|0\|0 | 2 | 0.67 | 0\|2\|0 | 0.04 | 0.11 | 0.04 | 0.11 | 0.04 | −5.43 | 1 | 0.71 |
| Q8N5F7 | NKAP | 2\|3\|2 | 7 | 2.33 | 0\|4\|0 | 0.03 | 0.06 | 0.03 | 0.06 | 0.03 | −3.92 | 1.75 | 0.75 |
| O43252 | PAPSS1 | 5\|4\|6 | 15 | 5 | 2\|2\|3 | 0.03 | 0.07 | 0.03 | 0.07 | 0.03 | −5.27 | 2.14 | 0.75 |
| Q9BZE1 | MRPL37 | 0\|2\|3 | 5 | 1.67 | 4\|0\|0 | 0.03 | 0.06 | 0.03 | 0.06 | 0.03 | −7.33 | 1.25 | 0.76 |
| O95376 | ARIH2 | 2\|2\|0 | 4 | 1.33 | 3\|0\|0 | 0.03 | 0.05 | 0.03 | 0.05 | 0.03 | −5.85 | 1.33 | 0.75 |
| P52298-3 | NCBP2 | 0\|4\|4 | 8 | 2.67 | 2\|0\|3 | 0.03 | 0.05 | 0.03 | 0.05 | 0.03 | −9.18 | 1.6 | 0.75 |
| Q9Y262 | EIF3L | 0\|2\|2 | 4 | 1.33 | 0\|3\|0 | 0.03 | 0.05 | 0.03 | 0.05 | 0.03 | −5.85 | 1.33 | 0.75 |
| O95817 | BAG3 | 4\|5\|8 | 17 | 5.67 | 3\|4\|2 | 0.03 | 0.1 | 0.03 | 0.1 | 0.03 | −7.59 | 1.89 | 0.75 |
| Q96Q11-2 | TRNT1 | 2\|3\|3 | 8 | 2.67 | 2\|0\|2 | 0.03 | 0.04 | 0.03 | 0.04 | 0.03 | −4.72 | 2 | 0.76 |
| P13674 | P4HA1 | 4\|7\|5 | 16 | 5.33 | 2\|3\|3 | 0.03 | 0.08 | 0.03 | 0.08 | 0.03 | −6.42 | 2 | 0.75 |
| Q96SK2-3 | TMEM209 | 0\|2\|2 | 4 | 1.33 | 0\|0\|3 | 0.03 | 0.05 | 0.03 | 0.05 | 0.03 | −5.85 | 1.33 | 0.75 |
| P41240 | CSK | 5\|4\|4 | 13 | 4.33 | 3\|3\|0 | 0.03 | 0.05 | 0.03 | 0.05 | 0.03 | −4.09 | 2.17 | 0.76 |
| Q9H9Y6-5 | POLR1B | 2\|3\|2 | 7 | 2.33 | 4\|0\|0 | 0.03 | 0.06 | 0.03 | 0.06 | 0.03 | −3.92 | 1.75 | 0.75 |
| Q99816-2 | TSG101 | 2\|2\|0 | 4 | 1.33 | 3\|0\|0 | 0.03 | 0.05 | 0.03 | 0.05 | 0.03 | −5.85 | 1.33 | 0.75 |
| Q96HA1 | POM121 | 2\|0\|0 | 2 | 0.67 | 0\|0\|3 | 0.02 | 0.05 | 0.02 | 0.05 | 0.02 | −5.85 | 0.67 | 0.77 |
| Q9UGP4 | LIMD1 | 3\|2\|2 | 7 | 2.33 | 0\|2\|2 | 0.02 | 0.04 | 0.02 | 0.04 | 0.02 | −4.72 | 1.75 | 0.77 |
| P61619 | SEC61A1 | 4\|3\|2 | 9 | 3 | 0\|2\|3 | 0.02 | 0.05 | 0.02 | 0.05 | 0.02 | −5.71 | 1.8 | 0.76 |
| Q01968 | OCRL | 3\|2\|0 | 5 | 1.67 | 0\|2\|2 | 0.02 | 0.04 | 0.02 | 0.04 | 0.02 | −7.85 | 1.25 | 0.78 |
| Q9H9T3-2 | ELP3 | 0\|0\|2 | 2 | 0.67 | 0\|0\|3 | 0.02 | 0.05 | 0.02 | 0.05 | 0.02 | −5.85 | 0.67 | 0.77 |
| Q86TB9-4 | PATL1 | 2\|0\|0 | 2 | 0.67 | 0\|0\|3 | 0.02 | 0.05 | 0.02 | 0.05 | 0.02 | −5.85 | 0.67 | 0.77 |
| Q9NVV4 | MTPAP | 2\|0\|3 | 5 | 1.67 | 0\|2\|2 | 0.02 | 0.04 | 0.02 | 0.04 | 0.02 | −7.85 | 1.25 | 0.78 |
| P48059 | LIMS1 | 0\|2\|0 | 2 | 0.67 | 0\|0\|3 | 0.02 | 0.05 | 0.02 | 0.05 | 0.02 | −5.85 | 0.67 | 0.77 |
| Q9Y653-5 | ADGRG1 | 2\|3\|0 | 5 | 1.67 | 0\|2\|2 | 0.02 | 0.04 | 0.02 | 0.04 | 0.02 | −7.85 | 1.25 | 0.78 |
| Q16513-3 | PKN2 | 0\|0\|4 | 4 | 1.33 | 2\|3\|0 | 0.02 | 0.05 | 0.02 | 0.05 | 0.02 | −9.18 | 0.8 | 0.78 |
| Q96IJ6 | GMPPA | 3\|0\|2 | 5 | 1.67 | 0\|2\|2 | 0.02 | 0.04 | 0.02 | 0.04 | 0.02 | −7.85 | 1.25 | 0.78 |
| Q9UKV8 | AGO2 | 4\|2\|2 | 8 | 2.67 | 3\|0\|2 | 0.02 | 0.05 | 0.02 | 0.05 | 0.02 | −5.71 | 1.6 | 0.77 |
| O43592 | XPOT | 2\|0\|3 | 5 | 1.67 | 0\|2\|2 | 0.02 | 0.04 | 0.02 | 0.04 | 0.02 | −7.85 | 1.25 | 0.78 |
| Q13418 | ILK | 3\|2\|0 | 5 | 1.67 | 2\|2\|0 | 0.02 | 0.04 | 0.02 | 0.04 | 0.02 | −7.85 | 1.25 | 0.78 |
| P55036 | PSMD4 | 4\|2\|5 | 11 | 3.67 | 0\|2\|4 | 0.02 | 0.05 | 0.02 | 0.05 | 0.02 | −6.72 | 1.83 | 0.76 |
| P61224-3 | RAP1B | 4\|2\|2 | 8 | 2.67 | 0\|2\|3 | 0.02 | 0.05 | 0.02 | 0.05 | 0.02 | −5.71 | 1.6 | 0.77 |
| Q13951 | CBFB | 2\|3\|2 | 7 | 2.33 | 2\|0\|2 | 0.02 | 0.04 | 0.02 | 0.04 | 0.02 | −4.72 | 1.75 | 0.77 |
| Q9Y3B2 | EXOSC1 | 2\|4\|3 | 9 | 3 | 3\|2\|0 | 0.02 | 0.05 | 0.02 | 0.05 | 0.02 | −5.71 | 1.8 | 0.76 |
| Q8WUM4 | PDCD6IP | 0\|4\|0 | 4 | 1.33 | 2\|0\|3 | 0.02 | 0.05 | 0.02 | 0.05 | 0.02 | −9.18 | 0.8 | 0.78 |
| Q9NQH7-2 | XPNPEP3 | 2\|0\|0 | 2 | 0.67 | 0\|0\|3 | 0.02 | 0.05 | 0.02 | 0.05 | 0.02 | −5.85 | 0.67 | 0.77 |
| O14818 | PSMA7 | 3\|3\|0 | 6 | 2 | 0\|2\|2 | 0.02 | 0.04 | 0.02 | 0.04 | 0.02 | −7.85 | 1.5 | 0.76 |
| Q13951-2 | CBFB | 3\|2\|2 | 7 | 2.33 | 2\|0\|2 | 0.02 | 0.04 | 0.02 | 0.04 | 0.02 | −4.72 | 1.75 | 0.77 |
| P51553 | IDH3G | 2\|2\|3 | 7 | 2.33 | 2\|2\|0 | 0.02 | 0.04 | 0.02 | 0.04 | 0.02 | 4.72 | 1.75 | 0.77 |
| Q14195 | DPYSL3 | 2\|0\|0 | 2 | 0.67 | 0\|3\|0 | 0.02 | 0.05 | 0.02 | 0.05 | 0.02 | −5.85 | 0.67 | 0.77 |
| Q9H910 | JPT2 | 5\|3\|3 | 11 | 3.67 | 0\|3\|3 | 0.02 | 0.05 | 0.02 | 0.05 | 0.02 | −5.41 | 1.83 | 0.76 |
| Q14847 | LASP1 | 3\|2\|6 | 11 | 3.67 | 2\|2\|3 | 0.02 | 0.07 | 0.02 | 0.07 | 0.02 | −8.15 | 1.57 | 0.76 |
| O60841 | EIF5B | 2\|0\|4 | 6 | 2 | 2\|3\|0 | 0.02 | 0.05 | 0.02 | 0.05 | 0.02 | −9.18 | 1.2 | 0.78 |
| P17706-2 | PTPN2 | 4\|5\|2 | 11 | 3.67 | 3\|0\|3 | 0.02 | 0.05 | 0.02 | 0.05 | 0.02 | −6.87 | 1.83 | 0.76 |
| Q86X95-2 | CIR1 | 3\|0\|3 | 6 | 2 | 0\|2\|2 | 0.02 | 0.04 | 0.02 | 0.04 | 0.02 | −7.85 | 1.5 | 0.76 |
| Q15369-2 | ELOC | 0\|2\|3 | 5 | 1.67 | 2\|2\|0 | 0.02 | 0.04 | 0.02 | 0.04 | 0.02 | −7.85 | 1.25 | 0.78 |
| Q8N0X7 | SPG20 | 2\|0\|0 | 2 | 0.67 | 0\|0\|3 | 0.02 | 0.05 | 0.02 | 0.05 | 0.02 | −5.85 | 0.67 | 0.77 |
| Q14643-4 | ITPR1 | 2\|0\|0 | 2 | 0.67 | 3\|0\|0 | 0.02 | 0.05 | 0.02 | 0.05 | 0.02 | −5.85 | 0.67 | 0.77 |
| Q8ND04 | SMG8 | 2\|0\|0 | 2 | 0.67 | 0\|0\|3 | 0.02 | 0.05 | 0.02 | 0.05 | 0.02 | −5.85 | 0.67 | 0.77 |
| P30086 | PEBP1 | 3\|0\|4 | 7 | 2.33 | 0\|2\|3 | 0.02 | 0.05 | 0.02 | 0.05 | 0.02 | −9.18 | 1.4 | 0.76 |
| Q6IQ22 | RAB12 | 0\|0\|3 | 3 | 1 | 4\|0\|0 | 0.02 | 0.06 | 0.02 | 0.06 | 0.02 | −7.33 | 0.75 | 0.76 |
| Q04206-2 | RELA | 2\|3\|4 | 9 | 3 | 3\|2\|0 | 0.02 | 0.05 | 0.02 | 0.05 | 0.02 | −5.71 | 1.8 | 0.76 |
| P17098 | ZNF8 | 3\|0\|2 | 5 | 1.67 | 2\|0\|2 | 0.02 | 0.04 | 0.02 | 0.04 | 0.02 | −7.85 | 1.25 | 0.78 |
| Q96GM8 | TOE1 | 0\|2\|0 | 2 | 0.67 | 0\|0\|3 | 0.02 | 0.05 | 0.02 | 0.05 | 0.02 | −5.85 | 0.67 | 0.77 |
| Q9Y570 | PPME1 | 6\|3\|2 | 11 | 3.67 | 3\|0\|4 | 0.02 | 0.06 | 0.02 | 0.06 | 0.02 | −7.98 | 1.57 | 0.76 |
| P61923 | COPZ1 | 3\|2\|0 | 5 | 1.67 | 0\|2\|2 | 0.02 | 0.04 | 0.02 | 0.04 | 0.02 | −7.85 | 1.25 | 0.78 |
| P61011-2 | SRP54 | 3\|0\|2 | 5 | 1.67 | 2\|2\|0 | 0.02 | 0.04 | 0.02 | 0.04 | 0.02 | −7.85 | 1.25 | 0.78 |
| Q8WVV9-5 | HNRNPLL | 6\|0\|6 | 12 | 4 | 3\|2\|3 | 0.02 | 0.02 | 0.02 | 0.02 | 0.02 | −13.44 | 1.5 | 0.78 |
| A1L0T0 | ILVBL | 3\|0\|3 | 6 | 2 | 2\|0\|2 | 0.02 | 0.04 | 0.02 | 0.04 | 0.02 | −7.85 | 1.5 | 0.76 |
| O75436 | VPS26A | 2\|0\|3 | 5 | 1.67 | 3\|0\|2 | 0.01 | 0.01 | 0.01 | 0.01 | 0.01 | −9.18 | 1 | 0.8 |
| Q96CS3 | FAF2 | 3\|0\|6 | 9 | 3 | 3\|2\|3 | 0.01 | 0.02 | 0.01 | 0.02 | 0.01 | −13.44 | 1.12 | 0.79 |
| O60762 | DPM1 | 2\|2\|0 | 4 | 1.33 | 2\|2\|0 | 0.01 | 0.01 | 0.01 | 0.01 | 0.01 | −7.85 | 1 | 0.8 |
| Q13347 | EIF31 | 3\|5\|0 | 8 | 2.67 | 3\|0\|4 | 0.01 | 0.02 | 0.01 | 0.02 | 0.01 | −11.81 | 1.14 | 0.79 |
| O75400-2 | PRPF40A | 4\|0\|3 | 7 | 2.33 | 0\|4\|2 | 0.01 | 0.02 | 0.01 | 0.02 | 0.01 | −10.24 | 1.17 | 0.79 |
| P10398 | ARAF | 2\|3\|0 | 5 | 1.67 | 3\|0\|2 | 0.01 | 0.01 | 0.01 | 0.01 | 0.01 | −9.18 | 1 | 0.8 |
| P50579-2 | METAP2 | 2\|0\|2 | 4 | 1.33 | 2\|0\|2 | 0.01 | 0.01 | 0.01 | 0.01 | 0.01 | −7.85 | 1 | 0.8 |
| Q9BV20 | MRI1 | 2\|3\|4 | 9 | 3 | 3\|0\|3 | 0.01 | 0.02 | 0.01 | 0.02 | 0.01 | −6.87 | 1.5 | 0.79 |
| P27695 | APEX1 | 2\|0\|4 | 6 | 2 | 3\|0\|3 | 0.01 | 0.02 | 0.01 | 0.02 | 0.01 | −10.39 | 1 | 0.81 |
| Q13330-2 | MTA1 | 0\|2\|3 | 5 | 1.67 | 2\|0\|3 | 0.01 | 0.01 | 0.01 | 0.01 | 0.01 | −9.18 | 1 | 0.8 |
| Q9H3P7 | ACBD3 | 3\|4\|2 | 9 | 3 | 2\|4\|0 | 0.01 | 0.02 | 0.01 | 0.02 | 0.01 | −6.72 | 1.5 | 0.79 |
| Q8IVF2-3 | AHNAK2 | 8\|5\|10 | 23 | 7.67 | 6\|4\|3 | 0.01 | 0.02 | 0.01 | 0.02 | 0.01 | −10.83 | 1.77 | 0.8 |
| Q9H078-4 | CLPB | 3\|0\|0 | 3 | 1 | 2\|0\|2 | 0.01 | 0.04 | 0.01 | 0.04 | 0.01 | −7.85 | 0.75 | 0.78 |
| Q14019 | COTL1 | 6\|2\|5 | 13 | 4.33 | 2\|2\|4 | 0.01 | 0.02 | 0.01 | 0.02 | 0.01 | −9.34 | 1.62 | 0.79 |
| Q7L5Y9-3 | MAEA | 0\|3\|2 | 5 | 1.67 | 2\|0\|3 | 0.01 | 0.01 | 0.01 | 0.01 | 0.01 | −9.18 | 1 | 0.8 |
| P67809 | YBX1 | 2\|7\|7 | 16 | 5.33 | 4\|2\|4 | 0.01 | 0.01 | 0.01 | 0.01 | 0.01 | −11.76 | 1.6 | 0.8 |
| Q9Y223-4 | GNE | 0\|2\|2 | 4 | 1.33 | 2\|0\|2 | 0.01 | 0.01 | 0.01 | 0.01 | 0.01 | −7.85 | 1 | 0.8 |
| P25787 | PSMA2 | 0\|2\|2 | 4 | 1.33 | 0\|2\|2 | 0.01 | 0.01 | 0.01 | 0.01 | 0.01 | −7.85 | 1 | 0.8 |
| O95831-3 | AIFM1 | 3\|2\|2 | 7 | 2.33 | 2\|0\|3 | 0.01 | 0.01 | 0.01 | 0.01 | 0.01 | −5.71 | 1.4 | 0.8 |
| Q9H089 | LSG1 | 2\|0\|2 | 4 | 1.33 | 0\|2\|2 | 0.01 | 0.01 | 0.01 | 0.01 | 0.01 | −7.85 | 1 | 0.8 |
| Q9ULC3 | RAB23 | 3\|0\|0 | 3 | 1 | 0\|2\|2 | 0.01 | 0.04 | 0.01 | 0.04 | 0.01 | −7.85 | 0.75 | 0.78 |
| O43237-2 | DYNC1LI2 | 2\|0\|4 | 6 | 2 | 0\|3\|3 | 0.01 | 0.02 | 0.01 | 0.02 | 0.01 | −10.39 | 1 | 0.81 |
| Q15019 | 2-Sep | 3\|0\|0 | 3 | 1 | 2\|0\|2 | 0.01 | 0.04 | 0.01 | 0.04 | 0.01 | −7.85 | 0.75 | 0.78 |
| O14929-2 | HAT1 | 4\|2\|0 | 6 | 2 | 2\|2\|2 | 0.01 | 0.02 | 0.01 | 0.02 | 0.01 | −10.49 | 1 | 0.81 |
| P06753-3 | TPM3 | 2\|0\|2 | 4 | 1.33 | 2\|0\|2 | 0.01 | 0.01 | 0.01 | 0.01 | 0.01 | −7.85 | 1 | 0.8 |
| Q99570 | PIK3R4 | 0\|2\|2 | 4 | 1.33 | 0\|2\|2 | 0.01 | 0.01 | 0.01 | 0.01 | 0.01 | −7.85 | 1 | 0.8 |
| Q9UNF1-2 | MAGED2 | 4\|5\|7 | 16 | 5.33 | 4\|2\|3 | 0.01 | 0.03 | 0.01 | 0.03 | 0.01 | −7.59 | 1.78 | 0.79 |
| P11166 | SLC2A1 | 4\|3\|6 | 13 | 4.33 | 4\|2\|2 | 0.01 | 0.02 | 0.01 | 0.02 | 0.01 | −7.86 | 1.62 | 0.79 |
| Q8N6T3 | ARFGAP1 | 4\|4\|4 | 12 | 4 | 0\|3\|4 | 0.01 | 0.01 | 0.01 | 0.01 | 0.01 | −5.11 | 1.71 | 0.8 |
| P04049 | RAF1 | 4\|2\|2 | 8 | 2.67 | 2\|0\|4 | 0.01 | 0.02 | 0.01 | 0.02 | 0.01 | −6.72 | 1.33 | 0.8 |
| P30101 | PDIA3 | 2\|2\|2 | 6 | 2 | 0\|2\|2 | 0.01 | 0.01 | 0.01 | 0.01 | 0.01 | −4.72 | 1.5 | 0.79 |
| Q13637 | RAB32 | 2\|4\|3 | 9 | 3 | 3\|3\|0 | 0.01 | 0.02 | 0.01 | 0.02 | 0.01 | −6.87 | 1.5 | 0.79 |
| O95487-2 | SEC24B | 2\|2\|3 | 7 | 2.33 | 3\|0\|2 | 0.01 | 0.01 | 0.01 | 0.01 | 0.01 | −5.71 | 1.4 | 0.8 |
| Q13470-2 | TNK1 | 15\|18\|13 | 46 | 15.33 | 9\|8\|5 | 0.01 | 0.03 | 0.01 | 0.03 | 0.01 | −10.07 | 2.09 | 0.79 |
| O43847 | NRDC | 0\|2\|0 | 2 | 0.67 | 0\|4\|0 | 0.01 | 0.02 | 0.01 | 0.02 | 0.01 | −7.33 | 0.5 | 0.8 |
| Q8IZH2-2 | XRN1 | 3\|0\|2 | 5 | 1.67 | 0\|2\|3 | 0.01 | 0.01 | 0.01 | 0.01 | 0.01 | −9.18 | 1 | 0.8 |
| O43159 | RRP8 | 0\|0\|3 | 3 | 1 | 2\|0\|2 | 0.01 | 0.04 | 0.01 | 0.04 | 0.01 | −7.85 | 0.75 | 0.78 |
| Q14432 | PDE3A | 7\|6\|4 | 17 | 5.67 | 2\|3\|4 | 0.01 | 0.03 | 0.01 | 0.03 | 0.01 | −7.59 | 1.89 | 0.78 |
| P12931 | SRC | 2\|2\|2 | 6 | 2 | 2\|2\|0 | 0.01 | 0.01 | 0.01 | 0.01 | 0.01 | −4.72 | 1.5 | 0.79 |
| Q96HC4-6 | PDLIM5 | 9\|5\|10 | 24 | 8 | 4\|5\|4 | 0.01 | 0.02 | 0.01 | 0.02 | 0.01 | −10.83 | 1.85 | 0.79 |
| P48729 | CSNK1A1 | 3\|5\|3 | 11 | 3.67 | 4\|0\|3 | 0.01 | 0.02 | 0.01 | 0.02 | 0.01 | −6.46 | 1.57 | 0.79 |
| Q8NBF2-2 | NHLRC2 | 2\|0\|2 | 4 | 1.33 | 2\|0\|2 | 0.01 | 0.01 | 0.01 | 0.01 | 0.01 | −7.85 | 1 | 0.8 |
| Q96A65 | EXOC4 | 3\|3\|3 | 9 | 3 | 2\|3\|0 | 0.01 | 0.01 | 0.01 | 0.01 | 0.01 | −4.3 | 1.8 | 0.78 |
| Q96MU7-2 | YTHDC1 | 0\|3\|4 | 7 | 2.33 | 3\|3\|0 | 0.01 | 0.02 | 0.01 | 0.02 | 0.01 | −10.39 | 1.17 | 0.79 |
| Q9Y3D8 | AK6 | 2\|3\|3 | 8 | 2.67 | 3\|2\|0 | 0.01 | 0.01 | 0.01 | 0.01 | 0.01 | −5.71 | 1.6 | 0.79 |
| P27707 | DCK | 4\|0\|2 | 6 | 2 | 2\|2\|2 | 0.01 | 0.02 | 0.01 | 0.02 | 0.01 | −10.49 | 1 | 0.81 |
| Q6YN16-2 | HSDL2 | 5\|3\|3 | 11 | 3.67 | 3\|0\|4 | 0.01 | 0.02 | 0.01 | 0.02 | 0.01 | −6.46 | 1.57 | 0.79 |
| O60427 | FADS1 | 0\|2\|2 | 4 | 1.33 | 0\|2\|2 | 0.01 | 0.01 | 0.01 | 0.01 | 0.01 | −7.85 | 1 | 0.8 |
| Q9UJZ1-2 | STOML2 | 2\|0\|2 | 4 | 1.33 | 2\|0\|2 | 0.01 | 0.01 | 0.01 | 0.01 | 0.01 | −7.85 | 1 | 0.8 |
| Q96G03 | PGM2 | 2\|2\|3 | 7 | 2.33 | 3\|0\|2 | 0.01 | 0.01 | 0.01 | 0.01 | 0.01 | −5.71 | 1.4 | 0.8 |
| Q9H3S7 | PTPN23 | 2\|0\|2 | 4 | 1.33 | 0\|2\|2 | 0.01 | 0.01 | 0.01 | 0.01 | 0.01 | −7.85 | 1 | 0.8 |
| Q9UNY4 | TTF2 | 4\|2\|5 | 11 | 3.67 | 3\|4\|0 | 0.01 | 0.02 | 0.01 | 0.02 | 0.01 | −7.98 | 1.57 | 0.79 |
| Q15056-2 | EIF4H | 3\|2\|2 | 7 | 2.33 | 0\|3\|2 | 0.01 | 0.01 | 0.01 | 0.01 | 0.01 | −5.71 | 1.4 | 0.8 |
| Q12906 | ILF3 | 21\|14\|19 | 54 | 18 | 29\|37\|29 | 0 | 0 | 0 | 0 | 0 | −99.68 | 0.57 | 0.92 |
| P40227 | CCT6A | 31\|30\|35 | 96 | 32 | 33\|35\|44 | 0 | 0 | 0 | 0 | 0 | −91.49 | 0.86 | 0.92 |
| P24941-2 | CDK2 | 8\|3\|7 | 18 | 6 | 5\|4\|6 | 0 | 0 | 0 | 0 | 0 | −16.28 | 1.2 | 0.87 |
| P16435 | POR | 7\|5\|6 | 18 | 6 | 9\|3\|8 | 0 | 0 | 0 | 0 | 0 | −19.06 | 0.9 | 0.9 |
| P84077 | ARF1 | 14\|15\|12 | 41 | 13.67 | 18\|14\|16 | 0 | 0 | 0 | 0 | 0 | −42.17 | 0.85 | 0.92 |
| P62826 | RAN | 23\|13\|13 | 49 | 16.33 | 18\|15\|18 | 0 | 0 | 0 | 0 | 0 | −44.22 | 0.96 | 0.91 |
| P51610-2 | HCFC1 | 2\|0\|2 | 4 | 1.33 | 12\|5\|4 | 0 | 0 | 0 | 0 | 0 | −32 | 0.19 | 0.92 |
| P51610-4 | HCFC1 | 3\|0\|2 | 5 | 1.67 | 13\|5\|5 | 0 | 0 | 0 | 0 | 0 | −35.01 | 0.22 | 0.92 |
| Q00535 | CDK5 | 5\|4\|4 | 13 | 4.33 | 4\|4\|3 | 0 | 0 | 0 | 0 | 0 | −9.93 | 1.18 | 0.87 |
| Q6Y7W6-4 | GIGYF2 | 6\|6\|10 | 22 | 7.33 | 5\|11\|9 | 0 | 0 | 0 | 0 | 0 | −23.72 | 0.88 | 0.9 |
| O00763-3 | ACACB | 129\|117\|127 | 373 | 124.33 | 116\|118\| | 0 | 0 | 0 | 0 | 0 | −233.73 | 1.09 | 0.92 |
| | | | | | 107 | | | | | | | | |
| Q9UMZ2-8 | SYNRG | 12\|8\|10 | 30 | 10 | 11\|9\|7 | 0 | 0 | 0 | 0 | 0 | −22.92 | 1.11 | 0.9 |
| Q12873-2 | CHD3 | 0\|0\|2 | 2 | 0.67 | 3\|4\|5 | 0 | 0 | 0 | 0 | 0 | −19.16 | 0.17 | 0.92 |
| Q9UBM7 | DHCR7 | 2\|0\|0 | 2 | 0.67 | 0\|3\|2 | 0 | 0 | 0 | 0 | 0 | −9.18 | 0.4 | 0.84 |
| P02545 | LMNA | 14\|19\|18 | 51 | 17 | 17\|16\|20 | 0 | 0 | 0 | 0 | 0 | −45.05 | 0.96 | 0.91 |
| P40429 | RPL13A | 7\|5\|11 | 23 | 7.67 | 9\|10\|8 | 0 | 0 | 0 | 0 | 0 | −28 | 0.85 | 0.91 |
| Q7Z3T8 | ZFYVE16 | 8\|6\|5 | 19 | 6.33 | 11\|3\|9 | 0 | 0 | 0 | 0 | 0 | −22.63 | 0.83 | 0.9 |
| Q13838 | DDX39B | 14\|13\|10 | 37 | 12.33 | 11\|10\|12 | 0 | 0 | 0 | 0 | 0 | −27.07 | 1.12 | 0.91 |
| Q96T37-4 | RBM15 | 2\|0\|2 | 4 | 1.33 | 5\|2\|3 | 0 | 0 | 0 | 0 | 0 | −16.29 | 0.4 | 0.92 |
| Q12834 | CDC20 | 3\|3\|8 | 14 | 4.67 | 4\|4\|3 | 0 | 0.01 | 0 | 0.01 | 0 | −11.41 | 1.27 | 0.81 |
| P02769 | P02769 | 21\|14\|13 | 48 | 16 | 39\|5\|6 | 0 | 0 | 0 | 0 | 0 | −41.58 | 0.96 | 0.91 |
| P02768 | ALB | 3\|2\|2 | 7 | 2.33 | 4\|2\|2 | 0 | 0 | 0 | 0 | 0 | −9.34 | 0.88 | 0.87 |
| P05387 | RPLP2 | 2\|4\|5 | 11 | 3.67 | 3\|3\|3 | 0 | 0 | 0 | 0 | 0 | −10.47 | 1.22 | 0.85 |
| P78346 | RPP30 | 0\|2\|0 | 2 | 0.67 | 0\|3\|2 | 0 | 0 | 0 | 0 | 0 | −9.18 | 0.4 | 0.84 |
| P05388 | RPLPO | 2\|6\|6 | 14 | 4.67 | 5\|5\|3 | 0 | 0 | 0 | 0 | 0 | −15.6 | 1.08 | 0.87 |
| P62979 | RPS27A | 26\|20\|28 | 74 | 24.67 | 25\|22\|21 | 0 | 0 | 0 | 0 | 0 | −53.79 | 1.09 | 0.92 |
| Q9BQ52-4 | ELAC2 | 3\|2\|0 | 5 | 1.67 | 2\|3\|3 | 0 | 0 | 0 | 0 | 0 | −13.44 | 0.63 | 0.87 |
| P35251-2 | RFC1 | 0\|4\|3 | 7 | 2.33 | 5\|4\|4 | 0 | 0 | 0 | 0 | 0 | −20.66 | 0.54 | 0.92 |
| Q15365 | PCBP1 | 24\|21\|30 | 75 | 25 | 24\|24\|24 | 0 | 0 | 0 | 0 | 0 | −57.05 | 1.04 | 0.92 |
| Q13085-4 | ACACA | 734\|656\|730 | 2120 | 706.67 | 657\|672\| | 0 | 0 | 0 | 0 | 0 | #NAME? | 1.06 | 0.92 |
| | | | | | 672 | | | | | | | | |
| P29401 | TKT | 5\|2\|4 | 11 | 3.67 | 3\|4\|3 | 0 | 0 | 0 | 0 | 0 | −11.76 | 1.1 | 0.86 |
| Q13907 | IDI1 | 4\|5\|3 | 12 | 4 | 5\|6\|4 | 0 | 0 | 0 | 0 | 0 | −16.28 | 0.8 | 0.92 |
| P84085 | ARF5 | 7\|9\|5 | 21 | 7 | 10\|6\|10 | 0 | 0 | 0 | 0 | 0 | −26.73 | 0.81 | 0.91 |
| P07900 | HSP90AA1 | 50\|42\|51 | 143 | 47.67 | 56\|55\|55 | 0 | 0 | 0 | 0 | 0 | −138.42 | 0.86 | 0.92 |
| P39023 | RPL3 | 26\|21\|18 | 65 | 21.67 | 23\|30\|25 | 0 | 0 | 0 | 0 | 0 | −69.46 | 0.83 | 0.92 |
| P35241 | RDX | 0\|2\|0 | 2 | 0.67 | 3\|3\|2 | 0 | 0 | 0 | 0 | 0 | −13.44 | 0.25 | 0.92 |
| O75439 | PMPCB | 8\|4\|6 | 18 | 6 | 9\|9\|11 | 0 | 0 | 0 | 0 | 0 | −32.71 | 0.62 | 0.92 |
| O95251-2 | KAT7 | 0\|0\|2 | 2 | 0.67 | 2\|3\|2 | 0 | 0 | 0 | 0 | 0 | −11.98 | 0.29 | 0.92 |
| Q96AC1 | FERMT2 | 17\|15\|13 | 45 | 15 | 9\|10\|14 | 0 | 0 | 0 | 0 | 0 | −22.74 | 1.36 | 0.9 |
| P10316 | HLA-A | 4\|2\|2 | 8 | 2.67 | 5\|3\|3 | 0 | 0 | 0 | 0 | 0 | −13.04 | 0.73 | 0.88 |
| P13646-3 | KRT13 | 10\|7\|6 | 23 | 7.67 | 9\|8\|6 | 0 | 0 | 0 | 0 | 0 | −21.22 | 1 | 0.9 |
| Q9H1A4 | ANAPC1 | 2\|0\|0 | 2 | 0.67 | 6\|6\|5 | 0 | 0 | 0 | 0 | 0 | −26.53 | 0.12 | 0.92 |
| Q7Z6Z7-3 | HUWE1 | 5\|4\|4 | 13 | 4.33 | 4\|7\|11 | 0 | 0 | 0 | 0 | 0 | −23.3 | 0.59 | 0.92 |
| Q99081 | TCF12 | 0\|2\|0 | 2 | 0.67 | 7\|3\|7 | 0 | 0 | 0 | 0 | 0 | −26.53 | 0.12 | 0.92 |
| P60981-2 | DSTN | 0\|0\|7 | 7 | 2.33 | 3\|4\|6 | 0 | 0 | 0 | 0 | 0 | −20.66 | 0.54 | 0.87 |
| Q5TDH0 | DDI2 | 4\|3\|2 | 9 | 3 | 5\|2\|2 | 0 | 0 | 0 | 0 | 0 | −10.47 | 1 | 0.86 |
| Q14562 | DHX8 | 2\|0\|0 | 2 | 0.67 | 0\|6\|4 | 0 | 0 | 0 | 0 | 0 | −15.92 | 0.2 | 0.92 |
| O60763 | USO1 | 3\|2\|4 | 9 | 3 | 5\|3\|3 | 0 | 0 | 0 | 0 | 0 | −13.04 | 0.82 | 0.88 |
| P18077 | RPL35A | 5\|3\|4 | 12 | 4 | 6\|5\|5 | 0 | 0 | 0 | 0 | 0 | −17.58 | 0.75 | 0.92 |
| Q15181 | PPA1 | 6\|4\|6 | 16 | 5.33 | 7\|7\|9 | 0 | 0 | 0 | 0 | 0 | −24.75 | 0.7 | 0.92 |
| Q04637-8 | EIF4G1 | 10\|12\|13 | 35 | 11.67 | 14\|16\|13 | 0 | 0 | 0 | 0 | 0 | −39.35 | 0.81 | 0.92 |
| P17844 | DDX5 | 75\|76\|71 | 222 | 74 | 72\|66\|76 | 0 | 0 | 0 | 0 | 0 | −151.24 | 1.04 | 0.92 |
| Q2TAY7 | SMU1 | 6\|4\|6 | 16 | 5.33 | 7\|3\|6 | 0 | 0 | 0 | 0 | 0 | −15.87 | 1 | 0.89 |
| Q9Y5A9-2 | YTHDF2 | 2\|2\|0 | 4 | 1.33 | 3\|2\|2 | 0 | 0 | 0 | 0 | 0 | −11.98 | 0.57 | 0.92 |
| 043242 | PSMD3 | 12\|8\|11 | 31 | 10.33 | 9\|15\|14 | 0 | 0 | 0 | 0 | 0 | −36.58 | 0.82 | 0.92 |
| Q8N3C0 | ASCC3 | 13\|11\|10 | 34 | 11.33 | 8\|11\|10 | 0 | 0 | 0 | 0 | 0 | −22.38 | 1.17 | 0.9 |
| Q9NRF8 | CTPS2 | 0\|0\|2 | 2 | 0.67 | 2\|3\|2 | 0 | 0 | 0 | 0 | 0 | −11.98 | 0.29 | 0.92 |
| Q8WU90 | ZC3H15 | 0\|2\|2 | 4 | 1.33 | 3\|2\|0 | 0 | 0 | 0 | 0 | 0 | −9.18 | 0.8 | 0.83 |
| Q9BUF5 | TUBB6 | 39\|38\|38 | 115 | 38.33 | 41\|33\|34 | 0 | 0 | 0 | 0 | 0 | −74.58 | 1.06 | 0.92 |
| P48960-2 | CD97 | 2\|3\|3 | 8 | 2.67 | 6\|2\|5 | 0 | 0 | 0 | 0 | 0 | −15.6 | 0.62 | 0.92 |
| Q562R1 | ACTBL2 | 23\|26\|34 | 83 | 27.67 | 47\|36\|37 | 0 | 0 | 0 | 0 | 0 | −114.22 | 0.69 | 0.92 |
| Q02878 | RPL6 | 20\|20\|18 | 58 | 19.33 | 26\|21\|23 | 0 | 0 | 0 | 0 | 0 | −59.44 | 0.83 | 0.92 |
| P16152 | CBR1 | 2\|3\|2 | 7 | 2.33 | 8\|6\|5 | 0 | 0 | 0 | 0 | 0 | −23.65 | 0.37 | 0.92 |
| Q9UNX3 | RPL26L1 | 16\|11\|12 | 39 | 13 | 15\|11\|13 | 0 | 0 | 0 | 0 | 0 | −32.74 | 1 | 0.91 |
| Q9UGP8 | SEC63 | 0\|0\|2 | 2 | 0.67 | 3\|2\|2 | 0 | 0 | 0 | 0 | 0 | −11.98 | 0.29 | 0.92 |
| O43776 | NARS | 12\|12\|13 | 37 | 12.33 | 12\|16\|11 | 0 | 0 | 0 | 0 | 0 | −31.22 | 0.95 | 0.92 |
| P26640 | VARS | 20\|18\|21 | 59 | 19.67 | 16\|19\|20 | 0 | 0 | 0 | 0 | 0 | −41.32 | 1.07 | 0.91 |
| P26641 | EEF1G | 13\|11\|15 | 39 | 13 | 16\|16\|16 | 0 | 0 | 0 | 0 | 0 | −43.89 | 0.81 | 0.92 |
| Q16527 | CSRP2 | 16\|10\|10 | 36 | 12 | 10\|9\|9 | 0 | 0 | 0 | 0 | 0 | −21.2 | 1.29 | 0.89 |
| P29692-3 | EEF1D | 8\|10\|9 | 27 | 9 | 7\|8\|8 | 0 | 0 | 0 | 0 | 0 | −18.23 | 1.17 | 0.9 |
| P60709 | ACTB | 90\|85\|91 | 266 | 88.67 | 109\|107\|97 | 0 | 0 | 0 | 0 | 0 | −248.92 | 0.85 | 0.92 |
| Q00534 | CDK6 | 9\|6\|9 | 24 | 8 | 8\|7\|7 | 0 | 0 | 0 | 0 | 0 | −20 | 1.09 | 0.9 |
| P58107 | EPPK1 | 24\|28\|22 | 74 | 24.67 | 32\|38\|32 | 0 | 0 | 0 | 0 | 0 | −92.81 | 0.73 | 0.92 |
| O00203-3 | AP3B1 | 0\|0\|3 | 3 | 1 | 3\|3\|3 | 0 | 0 | 0 | 0 | 0 | −14.8 | 0.33 | 0.92 |
| Q9UHB6-5 | LIMA1 | 10\|11\|8 | 29 | 9.67 | 5\|5\|6 | 0 | 0 | 0 | 0 | 0 | −10.07 | 1.81 | 0.84 |
| Q9UHB6-2 | LIMA1 | 10\|11\|10 | 31 | 10.33 | 6\|5\|7 | 0 | 0 | 0 | 0 | 0 | −9.61 | 1.72 | 0.87 |
| Q9NUU7 | DDX19A | 8\|6\|7 | 21 | 7 | 8\|3\|8 | 0 | 0 | 0 | 0 | 0 | −16.41 | 1.11 | 0.9 |
| P49411 | TUFM | 23\|29\|29 | 81 | 27 | 33\|26\|27 | 0 | 0 | 0 | 0 | 0 | −70.94 | 0.94 | 0.92 |
| P48147 | PREP | 3\|5\|3 | 11 | 3.67 | 7\|3\|4 | 0 | 0 | 0 | 0 | 0 | −15.06 | 0.79 | 0.89 |
| P62495 | ETF1 | 3\|4\|3 | 10 | 3.33 | 3\|3\|3 | 0 | 0 | 0 | 0 | 0 | −9.04 | 1.11 | 0.86 |
| Q14966 | ZNF638 | 3\|4\|0 | 7 | 2.33 | 9\|7\|4 | 0 | 0 | 0 | 0 | 0 | −30.95 | 0.35 | 0.92 |
| P50395 | GDI2 | 15\|15\|17 | 47 | 15.67 | 16\|19\|19 | 0 | 0 | 0 | 0 | 0 | −44.65 | 0.87 | 0.92 |
| P49841-2 | GSK3B | 6\|3\|4 | 13 | 4.33 | 4\|6\|3 | 0 | 0 | 0 | 0 | 0 | −13.81 | 1 | 0.88 |
| Q13643 | FHL3 | 2\|2\|2 | 6 | 2 | 3\|2\|2 | 0 | 0 | 0 | 0 | 0 | −8.15 | 0.86 | 0.92 |
| P25205 | MCM3 | 3\|2\|2 | 7 | 2.33 | 3\|2\|2 | 0 | 0 | 0 | 0 | 0 | −8.15 | 1 | 0.85 |
| Q16186 | ADRM1 | 4\|4\|4 | 12 | 4 | 3\|2\|6 | 0 | 0 | 0 | 0 | 0 | −9.95 | 1.09 | 0.88 |
| P0C0S5 | H2AFZ | 0\|0\|2 | 2 | 0.67 | 2\|2\|2 | 0 | 0 | 0 | 0 | 0 | −10.49 | 0.33 | 0.92 |
| O95453-4 | PARN | 3\|2\|0 | 5 | 1.67 | 2\|2\|2 | 0 | 0 | 0 | 0 | 0 | −10.49 | 0.83 | 0.84 |
| A0MZ66 | SHTN1 | 11\|12\|8 | 31 | 10.33 | 19\|19\|21 | 0 | 0 | 0 | 0 | 0 | −64.37 | 0.53 | 0.92 |
| Q96HS1 | PGAM5 | 3\|4\|4 | 11 | 3.67 | 6\|4\|3 | 0 | 0 | 0 | 0 | 0 | −13.81 | 0.85 | 0.92 |
| Q7Z478 | DHX29 | 5\|3\|4 | 12 | 4 | 3\|3\|2 | 0 | 0.01 | 0 | 0.01 | 0 | −7.86 | 1.5 | 0.83 |
| Q9NVM9 | INTS13 | 0\|0\|3 | 3 | 1 | 4\|2\|2 | 0 | 0 | 0 | 0 | 0 | −13.44 | 0.38 | 0.87 |
| Q99613-2 | EIF3C | 13\|12\|19 | 44 | 14.67 | 17\|17\|13 | 0 | 0 | 0 | 0 | 0 | −40.94 | 0.94 | 0.91 |
| Q12797-10 | ASPH | 3\|4\|3 | 10 | 3.33 | 3\|3\|2 | 0 | 0 | 0 | 0 | 0 | −7.86 | 1.25 | 0.85 |
| O15067 | PFAS | 23\|22\|20 | 65 | 21.67 | 21\|21\|25 | 0 | 0 | 0 | 0 | 0 | −52.58 | 0.97 | 0.92 |
| Q9NSV4-7 | DIAPH3 | 0\|0\|2 | 2 | 0.67 | 0\|2\|2 | 0 | 0.01 | 0 | 0.01 | 0 | −7.85 | 0.5 | 0.82 |
| P60891 | PRPS1 | 9\|7\|9 | 25 | 8.33 | 6\|10\|8 | 0 | 0 | 0 | 0 | 0 | −20.85 | 1.04 | 0.9 |
| Q9NZM5 | NOP53 | 2\|0\|0 | 2 | 0.67 | 0\|2\|2 | 0 | 0.01 | 0 | 0.01 | 0 | −7.85 | 0.5 | 0.82 |
| P31942-2 | HNRNPH3 | 6\|3\|4 | 13 | 4.33 | 4\|5\|4 | 0 | 0 | 0 | 0 | 0 | −13.81 | 1 | 0.88 |
| Q86YP4-2 | GATAD2A | 6\|4\|4 | 14 | 4.67 | 7\|5\|5 | 0 | 0 | 0 | 0 | 0 | −17.11 | 0.82 | 0.9 |
| Q9BXP5-5 | SRRT | 5\|2\|2 | 9 | 3 | 4\|4\|4 | 0 | 0 | 0 | 0 | 0 | −14.26 | 0.75 | 0.88 |
| P42765 | ACAA2 | 12\|12\|9 | 33 | 11 | 3\|6\|9 | 0 | 0 | 0 | 0 | 0 | −10.95 | 1.83 | 0.85 |
| P06748-2 | NPM1 | 6\|6\|6 | 18 | 6 | 9\|8\|9 | 0 | 0 | 0 | 0 | 0 | −24.93 | 0.69 | 0.92 |
| Q96H79 | ZC3HAV1L | 0\|2\|0 | 2 | 0.67 | 0\|2\|2 | 0 | 0.01 | 0 | 0.01 | 0 | −7.85 | 0.5 | 0.82 |
| Q9Y295 | DRG1 | 5\|8\|4 | 17 | 5.67 | 10\|4\|4 | 0 | 0 | 0 | 0 | 0 | −18.07 | 0.94 | 0.89 |
| Q6UXN9 | WDR82 | 5\|6\|5 | 16 | 5.33 | 4\|6\|4 | 0 | 0 | 0 | 0 | 0 | −12.01 | 1.14 | 0.89 |
| P17066 | HSPA6 | 12\|11\|11 | 34 | 11.33 | 13\|9\|12 | 0 | 0 | 0 | 0 | 0 | −26.81 | 1 | 0.91 |
| P49959 | MRE11 | 3\|3\|3 | 9 | 3 | 6\|5\|4 | 0 | 0 | 0 | 0 | 0 | −16.28 | 0.6 | 0.92 |
| P68371 | TUBB4B | 104\|104\|104 | 312 | 104 | 114\|111\| | 0 | 0 | 0 | 0 | 0 | −244.53 | 0.93 | 0.92 |
| | | | | | 109 | | | | | | | | |
| Q01813 | PFKP | 18\|27\|23 | 68 | 22.67 | 23\|22\|21 | 0 | 0 | 0 | 0 | 0 | −54.5 | 1.03 | 0.92 |
| P49792 | RANBP2 | 35\|36\|47 | 118 | 39.33 | 64\|55\|55 | 0 | 0 | 0 | 0 | 0 | −161.27 | 0.68 | 0.92 |
| P56545 | CTBP2 | 4\|2\|2 | 8 | 2.67 | 4\|2\|5 | 0 | 0 | 0 | 0 | 0 | −13.04 | 0.73 | 0.88 |
| P23588 | EIF4B | 7\|8\|9 | 24 | 8 | 10\|8\|7 | 0 | 0 | 0 | 0 | 0 | −22.07 | 0.96 | 0.91 |
| O60293-2 | ZFC3H1 | 2\|3\|2 | 7 | 2.33 | 0\|3\|4 | 0 | 0 | 0 | 0 | 0 | −7.98 | 1 | 0.85 |
| O76031 | CLPX | 4\|6\|5 | 15 | 5 | 7\|5\|4 | 0 | 0 | 0 | 0 | 0 | −15.87 | 0.94 | 0.9 |
| Q9NRZ9-3 | HELLS | 6\|4\|3 | 13 | 4.33 | 51\|50\|52 | 0 | 0 | 0 | 0 | 0 | −215.19 | 0.08 | 0.92 |
| Q86W42-3 | THOC6 | 0\|4\|2 | 6 | 2 | 4\|4\|4 | 0 | 0 | 0 | 0 | 0 | −19.16 | 0.5 | 0.92 |
| P18124 | RPL7 | 20\|13\|18 | 51 | 17 | 24\|13\|15 | 0 | 0 | 0 | 0 | 0 | −45.24 | 0.98 | 0.91 |
| O00154-6 | ACOT7 | 5\|5\|5 | 15 | 5 | 8\|5\|4 | 0 | 0 | 0 | 0 | 0 | −15.55 | 0.88 | 0.92 |
| P62873-2 | GNB1 | 3\|3\|4 | 10 | 3.33 | 2\|3\|5 | 0 | 0 | 0 | 0 | 0 | −10.22 | 1 | 0.88 |
| P31483 | TIA1 | 7\|5\|4 | 16 | 5.33 | 4\|4\|4 | 0 | 0 | 0 | 0 | 0 | −11.11 | 1.33 | 0.86 |
| P26368-2 | U2AF2 | 12\|7\|9 | 28 | 9.33 | 20\|9\|7 | 0 | 0 | 0 | 0 | 0 | −35.25 | 0.78 | 0.92 |
| P20340 | RAB6A | 8\|8\|8 | 24 | 8 | 9\|10\|11 | 0 | 0 | 0 | 0 | 0 | −26.54 | 0.8 | 0.92 |
| O00505 | KPNA3 | 2\|2\|2 | 6 | 2 | 3\|3\|2 | 0 | 0 | 0 | 0 | 0 | −9.34 | 0.75 | 0.92 |
| Q9Y4P3 | TBL2 | 6\|7\|5 | 18 | 6 | 4\|6\|4 | 0 | 0 | 0 | 0 | 0 | −12.01 | 1.29 | 0.88 |
| P08708 | RPS17 | 5\|6\|5 | 16 | 5.33 | 3\|8\|11 | 0 | 0 | 0 | 0 | 0 | −21.35 | 0.73 | 0.92 |
| Q01581 | HMGCS1 | 12\|13\|15 | 40 | 13.33 | 17\|19\|22 | 0 | 0 | 0 | 0 | 0 | −54.84 | 0.69 | 0.92 |
| P29692 | EEF1D | 9\|12\|11 | 32 | 10.67 | 7\|8\|10 | 0 | 0 | 0 | 0 | 0 | −19.13 | 1.28 | 0.9 |
| P78344 | EIF4G2 | 26\|24\|28 | 78 | 26 | 21\|11\|14 | 0 | 0 | 0 | 0 | 0 | −22.65 | 1.7 | 0.9 |
| Q9H2U1-3 | DHX36 | 5\|5\|5 | 15 | 5 | 4\|3\|3 | 0 | 0 | 0 | 0 | 0 | −7.34 | 1.5 | 0.85 |
| Q9BXB5 | OSBPL10 | 0\|0\|2 | 2 | 0.67 | 2\|3\|2 | 0 | 0 | 0 | 0 | 0 | −11.98 | 0.29 | 0.92 |
| Q96P48-7 | ARAP1 | 0\|0\|2 | 2 | 0.67 | 3\|0\|2 | 0 | 0 | 0 | 0 | 0 | −9.18 | 0.4 | 0.84 |
| Q14566 | MCM6 | 14\|8\|12 | 34 | 11.33 | 8\|13\|16 | 0 | 0 | 0 | 0 | 0 | −35.26 | 0.92 | 0.91 |
| O00139-2 | KIF2A | 4\|3\|5 | 12 | 4 | 3\|5\|5 | 0 | 0 | 0 | 0 | 0 | −13.81 | 0.92 | 0.89 |
| Q15637-4 | SF1 | 2\|3\|2 | 7 | 2.33 | 2\|2\|3 | 0 | 0 | 0 | 0 | 0 | −8.15 | 1 | 0.85 |
| Q9BSJ8 | ESYT1 | 2\|2\|0 | 4 | 1.33 | 2\|2\|2 | 0 | 0 | 0 | 0 | 0 | −10.49 | 0.67 | 0.92 |
| P62701 | RPS4X | 35\|35\|43 | 113 | 37.67 | 39\|41\|36 | 0 | 0 | 0 | 0 | 0 | −88.44 | 0.97 | 0.92 |
| P68431 | HIST1H3G; | 2\|2\|2 | 6 | 2 | 3\|2\|2 | 0 | 0 | 0 | 0 | 0 | −8.15 | 0.86 | 0.92 |
| | HIST1H3C; | | | | | | | | | | | | |
| | HIST [symbol] | | | | | | | | | | | | |
| P17858 | PFKL | 6\|7\|4 | 17 | 5.67 | 6\|7\|8 | 0 | 0 | 0 | 0 | 0 | −22.13 | 0.81 | 0.92 |
| Q9BTC0 | DIDO1 | 0\|0\|2 | 2 | 0.67 | 6\|4\|4 | 0 | 0 | 0 | 0 | 0 | −22.13 | 0.14 | 0.92 |
| O75083 | WDR1 | 18\|18\|16 | 52 | 17.33 | 19\|19\|14 | 0 | 0 | 0 | 0 | 0 | −40.71 | 1 | 0.91 |
| P58876 | HIST1H2BD | 3\|4\|6 | 13 | 4.33 | 9\|8\|5 | 0 | 0 | 0 | 0 | 0 | −25.47 | 0.59 | 0.92 |
| Q15149-7 | PLEC | 78\|76\|81 | 235 | 78.33 | 66\|62\|65 | 0 | 0 | 0 | 0 | 0 | −119.49 | 1.22 | 0.92 |
| P62913-2 | RPL11 | 7\|3\|4 | 14 | 4.67 | 3\|4\|4 | 0 | 0 | 0 | 0 | 0 | −11.41 | 1.27 | 0.84 |
| P53350 | PLK1 | 4\|3\|4 | 11 | 3.67 | 3\|3\|5 | 0 | 0 | 0 | 0 | 0 | −11.41 | 1 | 0.88 |
| P54886 | ALDH18A1 | 18\|16\|19 | 53 | 17.67 | 21\|16\|18 | 0 | 0 | 0 | 0 | 0 | −44.3 | 0.96 | 0.91 |
| P52732 | KIF11 | 10\|7\|11 | 28 | 9.33 | 10\|11\|9 | 0 | 0 | 0 | 0 | 0 | −28.2 | 0.93 | 0.91 |
| P46781 | RPS9 | 17\|16\|14 | 47 | 15.67 | 14\|16\|17 | 0 | 0 | 0 | 0 | 0 | −37.76 | 1 | 0.91 |
| P13804-2 | ETFA | 5\|6\|5 | 16 | 5.33 | 5\|7\|7 | 0 | 0 | 0 | 0 | 0 | −17.93 | 0.84 | 0.92 |
| O94808 | GFPT2 | 2\|2\|2 | 6 | 2 | 3\|2\|3 | 0 | 0 | 0 | 0 | 0 | −9.34 | 0.75 | 0.92 |
| P11182 | DBT | 67\|61\|76 | 204 | 68 | 59\|65\|71 | 0 | 0 | 0 | 0 | 0 | −143.5 | 1.05 | 0.92 |
| Q99459 | CDC5L | 3\|2\|0 | 5 | 1.67 | 7\|5\|5 | 0 | 0 | 0 | 0 | 0 | −26.53 | 0.29 | 0.92 |
| Q16512 | PKN1 | 0\|0\|2 | 2 | 0.67 | 4\|5\|5 | 0 | 0 | 0 | 0 | 0 | −22.13 | 0.14 | 0.92 |
| O15143 | ARPC1B | 12\|12\|8 | 32 | 10.67 | 11\|9\|11 | 0 | 0 | 0 | 0 | 0 | −27.78 | 1.03 | 0.91 |
| P20020-5 | ATP2B1 | 2\|2\|2 | 6 | 2 | 0\|2\|4 | 0 | 0 | 0 | 0 | 0 | −6.72 | 1 | 0.92 |
| P20340-2 | RAB6A | 8\|8\|9 | 25 | 8.33 | 11\|11\|12 | 0 | 0 | 0 | 0 | 0 | −31.51 | 0.74 | 0.92 |
| P40939 | HADHA | 17\|16\|17 | 50 | 16.67 | 16\|14\|19 | 0 | 0 | 0 | 0 | 0 | −37.17 | 1.02 | 0.91 |
| A0A0B4J2 | LOC- | 0\|0\|2 | 2 | 0.67 | 2\|0\|2 | 0 | 0.01 | 0 | 0.01 | 0 | −7.85 | 0.5 | 0.82 |
| D5-2 | 102724023 | | | | | | | | | | | | |
| P35579 | MYH9 | 18\|22\|26 | 66 | 22 | 23\|24\|21 | 0 | 0 | 0 | 0 | 0 | −56.97 | 0.97 | 0.92 |
| P31943 | HNRNPH1 | 38\|35\|38 | 111 | 37 | 44\|47\|54 | 0 | 0 | 0 | 0 | 0 | −124.15 | 0.77 | 0.92 |
| Q13356 | PPIL2 | 0\|0\|3 | 3 | 1 | 5\|4\|4 | 0 | 0 | 0 | 0 | 0 | −20.66 | 0.23 | 0.92 |
| Q8N1F7 | NUP93 | 3\|4\|4 | 11 | 3.67 | 4\|3\|6 | 0 | 0 | 0 | 0 | 0 | −13.81 | 0.85 | 0.92 |
| Q9BSV6 | TSEN34 | 3\|3\|3 | 9 | 3 | 3\|4\|0 | 0 | 0 | 0 | 0 | 0 | −6.46 | 1.29 | 0.83 |
| P38646 | HSPA9 | 28\|25\|34 | 87 | 29 | 36\|42\|34 | 0 | 0 | 0 | 0 | 0 | −100.12 | 0.78 | 0.92 |
| Q9UMS4 | PRPF19 | 5\|0\|0 | 5 | 1.67 | 8\|9\|12 | 0 | 0 | 0 | 0 | 0 | −44.25 | 0.17 | 0.92 |
| P60953 | CDC42 | 10\|7\|3 | 20 | 6.67 | 6\|6\|4 | 0 | 0 | 0 | 0 | 0 | −17.58 | 1.25 | 0.86 |
| Q9Y5B9 | SUPT16H | 7\|4\|8 | 19 | 6.33 | 12\|10\|9 | 0 | 0 | 0 | 0 | 0 | −35.41 | 0.61 | 0.92 |
| Q9GZT8-2 | NIF3L1 | 3\|3\|2 | 8 | 2.67 | 4\|4\|3 | 0 | 0 | 0 | 0 | 0 | −13.04 | 0.73 | 0.92 |
| O60610-2 | DIAPH1 | 5\|6\|6 | 17 | 5.67 | 6\|9\|8 | 0 | 0 | 0 | 0 | 0 | −22.9 | 0.74 | 0.92 |
| Q8N4C8-5 | MINK1 | 2\|3\|3 | 8 | 2.67 | 2\|3\|3 | 0 | 0 | 0 | 0 | 0 | −9.34 | 1 | 0.86 |
| Q9H0C8 | ILKAP | 0\|2\|3 | 5 | 1.67 | 2\|3\|3 | 0 | 0 | 0 | 0 | 0 | −13.44 | 0.63 | 0.87 |
| Q99460-2 | PSMD1 | 5\|4\|8 | 17 | 5.67 | 13\|9\|8 | 0 | 0 | 0 | 0 | 0 | −34.04 | 0.57 | 0.92 |
| Q9H6S0 | YTHDC2 | 2\|0\|0 | 2 | 0.67 | 2\|0\|2 | 0 | 0.01 | 0 | 0.01 | 0 | −7.85 | 0.5 | 0.82 |
| P60900-2 | PSMA6 | 2\|3\|0 | 5 | 1.67 | 4\|4\|2 | 0 | 0 | 0 | 0 | 0 | −16.29 | 0.5 | 0.92 |
| Q86UR5-12 | RIMS1 | 4\|0\|2 | 6 | 2 | 3\|3\|2 | 0 | 0 | 0 | 0 | 0 | −13.44 | 0.75 | 0.85 |
| P30566 | ADSL | 2\|2\|4 | 8 | 2.67 | 2\|2\|3 | 0 | 0.01 | 0 | 0.01 | 0 | −8.15 | 1.14 | 0.83 |
| Q8IX01-4 | SUGP2 | 2\|3\|2 | 7 | 2.33 | 24\|20\|24 | 0 | 0 | 0 | 0 | 0 | −93.96 | 0.1 | 0.92 |
| Q9NW13 | RBM28 | 0\|2\|3 | 5 | 1.67 | 5\|6\|7 | 0 | 0 | 0 | 0 | 0 | −27.96 | 0.28 | 0.92 |
| P38159 | RBMX | 11\|10\|14 | 35 | 11.67 | 34\|31\|32 | 0 | 0 | 0 | 0 | 0 | −111.88 | 0.36 | 0.92 |
| Q8IWZ3-6 | ANKHD1 | 6\|5\|10 | 21 | 7 | 6\|12\|10 | 0 | 0 | 0 | 0 | 0 | −29.32 | 0.75 | 0.91 |
| Q9Y285 | FARSA | 3\|0\|2 | 5 | 1.67 | 3\|5\|5 | 0 | 0 | 0 | 0 | 0 | −20.66 | 0.38 | 0.92 |
| P43034 | PAFAH1B1 | 7\|9\|6 | 22 | 7.33 | 7\|4\|8 | 0 | 0 | 0 | 0 | 0 | −16.44 | 1.16 | 0.89 |
| Q9BWM7 | SFXN3 | 3\|2\|3 | 8 | 2.67 | 3\|0\|4 | 0 | 0 | 0 | 0 | 0 | −7.98 | 1.14 | 0.84 |
| Q06124 | PTPN11 | 0\|4\|2 | 6 | 2 | 3\|4\|4 | 0 | 0 | 0 | 0 | 0 | −17.76 | 0.55 | 0.88 |
| Q9UHX1-4 | PUF60 | 7\|6\|7 | 20 | 6.67 | 6\|9\|6 | 0 | 0 | 0 | 0 | 0 | −18.77 | 0.95 | 0.92 |
| Q96HN2-2 | AHCYL2 | 5\|4\|6 | 15 | 5 | 7\|6\|5 | 0 | 0 | 0 | 0 | 0 | −18.31 | 0.83 | 0.92 |
| Q9UPQ9-1 | TNRC6B | 20\|20\|17 | 57 | 19 | 13\|15\|18 | 0 | 0 | 0 | 0 | 0 | −32.21 | 1.24 | 0.91 |
| P49916-4 | LIG3 | 0\|2\|0 | 2 | 0.67 | 2\|2\|0 | 0 | 0.01 | 0 | 0.01 | 0 | −7.85 | 0.5 | 0.82 |
| O95340 | PAPSS2 | 6\|6\|4 | 16 | 5.33 | 4\|7\|6 | 0 | 0 | 0 | 0 | 0 | −17.11 | 0.94 | 0.9 |
| O95347 | SMC2 | 11\|11\|10 | 32 | 10.67 | 14\|13\|18 | 0 | 0 | 0 | 0 | 0 | −41.87 | 0.71 | 0.92 |
| Q8IZP0-3 | ABI1 | 10\|13\|12 | 35 | 11.67 | 11\|11\|9 | 0 | 0 | 0 | 0 | 0 | −24.73 | 1.13 | 0.91 |
| Q99700-2 | ATXN2 | 0\|3\|5 | 8 | 2.67 | 4\|3\|3 | 0 | 0 | 0 | 0 | 0 | −16.29 | 0.8 | 0.86 |
| Q99729-3 | HNRNPAB | 4\|4\|4 | 12 | 4 | 4\|4\|5 | 0 | 0 | 0 | 0 | 0 | −12.29 | 0.92 | 0.92 |
| Q7L2H7-2 | EIF3M | 0\|0\|2 | 2 | 0.67 | 0\|2\|2 | 0 | 0.01 | 0 | 0.01 | 0 | −7.85 | 0.5 | 0.82 |
| Q9Y310 | RTCB | 11\|16\|18 | 45 | 15 | 15\|13\|13 | 0 | 0 | 0 | 0 | 0 | −35.19 | 1.1 | 0.91 |
| O75694-2 | NUP155 | 2\|2\|0 | 4 | 1.33 | 4\|3\|4 | 0 | 0 | 0 | 0 | 0 | −17.76 | 0.36 | 0.92 |
| P62829 | RPL23 | 10\|12\|12 | 34 | 11.33 | 14\|13\|14 | 0 | 0 | 0 | 0 | 0 | −36.85 | 0.83 | 0.92 |
| P62820 | RAB1A | 16\|14\|13 | 43 | 14.33 | 15\|18\|16 | 0 | 0 | 0 | 0 | 0 | −41.76 | 0.88 | 0.92 |
| P06733 | ENO1 | 87\|83\|87 | 257 | 85.67 | 85\|94\|105 | 0 | 0 | 0 | 0 | 0 | −216.77 | 0.9 | 0.92 |
| Q9Y4W6 | AFG3L2 | 3\|0\|3 | 6 | 2 | 3\|3\|6 | 0 | 0 | 0 | 0 | 0 | −19.16 | 0.5 | 0.92 |
| Q08378-2 | GOLGA3 | 0\|0\|2 | 2 | 0.67 | 6\|4\|0 | 0 | 0 | 0 | 0 | 0 | −15.92 | 0.2 | 0.92 |
| Q9NXH9-2 | TRMT1 | 9\|5\|9 | 23 | 7.67 | 8\|10\|10 | 0 | 0 | 0 | 0 | 0 | −29.32 | 0.82 | 0.92 |
| O95299 | NDUFA10 | 2\|2\|0 | 4 | 1.33 | 3\|3\|3 | 0 | 0 | 0 | 0 | 0 | −14.8 | 0.44 | 0.92 |
| Q92615 | LARP4B | 7\|8\|5 | 20 | 6.67 | 6\|7\|6 | 0 | 0 | 0 | 0 | 0 | −17.93 | 1.05 | 0.9 |
| Q99661 | KIF2C | 6\|4\|6 | 16 | 5.33 | 6\|6\|5 | 0 | 0 | 0 | 0 | 0 | −17.11 | 0.94 | 0.9 |
| P43490 | NAMPT | 16\|15\|16 | 47 | 15.67 | 18\|17\|19 | 0 | 0 | 0 | 0 | 0 | −44.65 | 0.87 | 0.92 |
| P10768 | ESD | 6\|5\|7 | 18 | 6 | 8\|9\|9 | 0 | 0 | 0 | 0 | 0 | −26.73 | 0.69 | 0.92 |
| Q9BZK7 | TBL1XR1 | 2\|2\|0 | 4 | 1.33 | 4\|2\|5 | 0 | 0 | 0 | 0 | 0 | −17.76 | 0.36 | 0.92 |
| P46063 | RECQL | 2\|3\|4 | 9 | 3 | 4\|4\|2 | 0 | 0 | 0 | 0 | 0 | −11.76 | 0.9 | 0.88 |
| O75964 | ATP5L | 0\|0\|2 | 2 | 0.67 | 2\|3\|0 | 0 | 0 | 0 | 0 | 0 | −9.18 | 0.4 | 0.84 |
| P42766 | RPL35 | 4\|0\|3 | 7 | 2.33 | 5\|3\|3 | 0 | 0 | 0 | 0 | 0 | −17.76 | 0.64 | 0.88 |
| P22087 | FBL | 3\|3\|3 | 9 | 3 | 6\|5\|6 | 0 | 0 | 0 | 0 | 0 | −18.88 | 0.53 | 0.92 |
| Q9UHD1 | CHORDC1 | 10\|15\|13 | 38 | 12.67 | 14\|14\|9 | 0 | 0 | 0 | 0 | 0 | −31.9 | 1.03 | 0.91 |
| Q96GX5-2 | MASTL | 3\|0\|0 | 3 | 1 | 0\|3\|5 | 0 | 0 | 0 | 0 | 0 | −13.21 | 0.38 | 0.86 |
| P53618 | COPB1 | 10\|10\|12 | 32 | 10.67 | 12\|13\|15 | 0 | 0 | 0 | 0 | 0 | −35.6 | 0.8 | 0.92 |
| P62318-2 | SNRPD3 | 2\|2\|0 | 4 | 1.33 | 2\|3\|2 | 0 | 0 | 0 | 0 | 0 | −11.98 | 0.57 | 0.92 |
| Q96JM3 | CHAMP1 | 2\|2\|2 | 6 | 2 | 6\|6\|5 | 0 | 0 | 0 | 0 | 0 | −20.94 | 0.35 | 0.92 |
| P50991 | CCT4 | 26\|20\|21 | 67 | 22.33 | 25\|24\|31 | 0 | 0 | 0 | 0 | 0 | −68.51 | 0.84 | 0.92 |
| P24666 | ACP1 | 4\|4\|5 | 13 | 4.33 | 3\|4\|4 | 0 | 0 | 0 | 0 | 0 | −9.93 | 1.18 | 0.87 |
| Q9GZS3 | WDR61 | 2\|3\|3 | 8 | 2.67 | 2\|4\|3 | 0 | 0 | 0 | 0 | 0 | −10.47 | 0.89 | 0.92 |
| Q96HC4 | PDLIM5 | 12\|7\|14 | 33 | 11 | 7\|7\|5 | 0 | 0 | 0 | 0 | 0 | −14.98 | 1.74 | 0.83 |
| Q9Y320-2 | TMX2 | 2\|0\|0 | 2 | 0.67 | 0\|2\|2 | 0 | 0.01 | 0 | 0.01 | 0 | −7.85 | 0.5 | 0.82 |
| P49327 | FASN | 66\|65\|65 | 196 | 65.33 | 65\|73\|73 | 0 | 0 | 0 | 0 | 0 | −156.56 | 0.93 | 0.92 |
| P00387-2 | CYB5R3 | 4\|3\|4 | 11 | 3.67 | 5\|5\|4 | 0 | 0 | 0 | 0 | 0 | −15.06 | 0.79 | 0.92 |
| O75340 | PDCD6 | 2\|0\|2 | 4 | 1.33 | 2\|2\|2 | 0 | 0 | 0 | 0 | 0 | −10.49 | 0.67 | 0.92 |
| P14618 | PKM | 80\|68\|71 | 219 | 73 | 80\|69\|81 | 0 | 0 | 0 | 0 | 0 | −174.79 | 0.95 | 0.92 |
| Q8TB61-3 | SLC35B2 | 0\|2\|0 | 2 | 0.67 | 0\|2\|2 | 0 | 0.01 | 0 | 0.01 | 0 | −7.85 | 0.5 | 0.82 |
| P25685 | DNAJB1 | 7\|8\|8 | 23 | 7.67 | 8\|11\|5 | 0 | 0 | 0 | 0 | 0 | −20.9 | 0.96 | 0.92 |
| P42167 | TMPO | 3\|2\|4 | 9 | 3 | 7\|6\|8 | 0 | 0 | 0 | 0 | 0 | −26.38 | 0.43 | 0.92 |
| P42166 | TMPO | 2\|2\|3 | 7 | 2.33 | 6\|5\|7 | 0 | 0 | 0 | 0 | 0 | −22.26 | 0.39 | 0.92 |
| P62195-2 | PSMC5 | 14\|14\|14 | 42 | 14 | 17\|15\|14 | 0 | 0 | 0 | 0 | 0 | −36.57 | 0.91 | 0.92 |
| Q8NFH3 | NUP43 | 4\|0\|3 | 7 | 2.33 | 5\|3\|3 | 0 | 0 | 0 | 0 | 0 | −17.76 | 0.64 | 0.88 |
| P18583-5 | SON | 6\|2\|6 | 14 | 4.67 | 12\|14\|8 | 0 | 0 | 0 | 0 | 0 | −44.69 | 0.41 | 0.92 |
| Q9NYK5 | MRPL39 | 4\|5\|4 | 13 | 4.33 | 4\|5\|6 | 0 | 0 | 0 | 0 | 0 | −14.62 | 0.87 | 0.92 |
| Q96PK6 | RBM14 | 21\|23\|21 | 65 | 21.67 | 23\|24\|23 | 0 | 0 | 0 | 0 | 0 | −54.65 | 0.93 | 0.92 |
| Q8N1G2 | CMTR1 | 2\|2\|4 | 8 | 2.67 | 5\|4\|5 | 0 | 0 | 0 | 0 | 0 | −16.93 | 0.57 | 0.92 |
| P41091 | EIF2S3 | 14\|19\|18 | 51 | 17 | 17\|22\|18 | 0 | 0 | 0 | 0 | 0 | −50 | 0.89 | 0.92 |
| O60231 | DHX16 | 2\|2\|3 | 7 | 2.33 | 5\|4\|4 | 0 | 0 | 0 | 0 | 0 | −15.6 | 0.54 | 0.92 |
| Q12906-7 | ILF3 | 21\|14\|19 | 54 | 18 | 29\|36\|30 | 0 | 0 | 0 | 0 | 0 | −99.68 | 0.57 | 0.92 |
| Q9BQE3 | TUBA1C | 81\|64\|72 | 217 | 72.33 | 71\|68\|73 | 0 | 0 | 0 | 0 | 0 | −159.29 | 1.02 | 0.92 |
| Q96KK5 | HIST1H2AH | 4\|5\|5 | 14 | 4.67 | 11\|9\|9 | 0 | 0 | 0 | 0 | 0 | −32.71 | 0.48 | 0.92 |
| Q9BQ39 | DDX50 | 0\|0\|2 | 2 | 0.67 | 4\|8\|5 | 0 | 0 | 0 | 0 | 0 | −26.53 | 0.12 | 0.92 |
| Q9NYY8 | FASTKD2 | 3\|4\|3 | 10 | 3.33 | 5\|5\|3 | 0 | 0 | 0 | 0 | 0 | −13.81 | 0.77 | 0.92 |
| P68366-2 | TUBA4A | 72\|62\|67 | 201 | 67 | 66\|67\|69 | 0 | 0 | 0 | 0 | 0 | −150.35 | 1 | 0.92 |
| Q9NS69 | TOMM22 | 2\|3\|0 | 5 | 1.67 | 3\|2\|7 | 0 | 0 | 0 | 0 | 0 | −18.99 | 0.42 | 0.92 |
| Q16658 | FSCN1 | 14\|15\|13 | 42 | 14 | 12\|10\|21 | 0 | 0 | 0 | 0 | 0 | −34.17 | 0.98 | 0.91 |
| Q9ULD2-2 | MTUS1 | 0\|0\|2 | 2 | 0.67 | 4\|4\|3 | 0 | 0 | 0 | 0 | 0 | −17.76 | 0.18 | 0.92 |
| Q9NXC5 | MIOS | 0\|0\|2 | 2 | 0.67 | 2\|2\|0 | 0 | 0.01 | 0 | 0.01 | 0 | −7.85 | 0.5 | 0.82 |
| P13489 | RNH1 | 6\|7\|10 | 23 | 7.67 | 7\|8\|9 | 0 | 0 | 0 | 0 | 0 | −22.42 | 0.96 | 0.9 |
| Q14839 | CHD4 | 0\|2\|5 | 7 | 2.33 | 13\|16\|14 | 0 | 0 | 0 | 0 | 0 | −65.05 | 0.16 | 0.92 |
| Q96124 | FUBP3 | 5\|4\|4 | 13 | 4.33 | 5\|6\|5 | 0 | 0 | 0 | 0 | 0 | −15.87 | 0.81 | 0.92 |
| P26639 | TARS | 24\|25\|31 | 80 | 26.67 | 37\|37\|34 | 0 | 0 | 0 | 0 | 0 | −96.82 | 0.74 | 0.92 |
| P50402 | EMD | 7\|7\|6 | 20 | 6.67 | 7\|7\|7 | 0 | 0 | 0 | 0 | 0 | −18.77 | 0.95 | 0.92 |
| Q96GA3 | LTV1 | 7\|6\|8 | 21 | 7 | 10\|8\|11 | 0 | 0 | 0 | 0 | 0 | −28.73 | 0.72 | 0.92 |
| P62899 | RPL31 | 4\|4\|3 | 11 | 3.67 | 3\|5\|3 | 0 | 0 | 0 | 0 | 0 | −11.41 | 1 | 0.88 |
| P31150 | GDI1 | 4\|6\|6 | 16 | 5.33 | 7\|5\|5 | 0 | 0 | 0 | 0 | 0 | −17.11 | 0.94 | 0.9 |
| Q86TG7 | PEG10 | 6\|5\|4 | 15 | 5 | 5\|5\|2 | 0 | 0 | 0 | 0 | 0 | −11.11 | 1.25 | 0.87 |
| P48444 | ARCN1 | 13\|14\|14 | 41 | 13.67 | 16\|16\|15 | 0 | 0 | 0 | 0 | 0 | −39.32 | 0.87 | 0.92 |
| Q9Y4E1-3 | WASHC2C | 2\|3\|2 | 7 | 2.33 | 2\|2\|4 | 0 | 0 | 0 | 0 | 0 | −9.34 | 0.88 | 0.87 |
| Q15233 | NONO | 45\|45\|49 | 139 | 46.33 | 48\|45\|47 | 0 | 0 | 0 | 0 | 0 | −102.03 | 0.99 | 0.92 |
| P29218 | IMPA1 | 3\|3\|5 | 11 | 3.67 | 5\|4\|6 | 0 | 0 | 0 | 0 | 0 | −16.28 | 0.73 | 0.92 |
| P35606-2 | COPB2 | 16\|15\|22 | 53 | 17.67 | 14\|22\|14 | 0 | 0 | 0 | 0 | 0 | −39.82 | 1.06 | 0.91 |
| O94776 | MTA2 | 8\|6\|13 | 27 | 9 | 16\|15\|16 | 0 | 0 | 0 | 0 | 0 | −52.61 | 0.57 | 0.92 |
| Q5JTZ9 | AARS2 | 3\|0\|3 | 6 | 2 | 2\|2\|2 | 0 | 0 | 0 | 0 | 0 | −10.49 | 1 | 0.83 |
| Q9UQ35 | SRRM2 | 7\|3\|8 | 18 | 6 | 18\|13\|15 | 0 | 0 | 0 | 0 | 0 | −58.89 | 0.39 | 0.92 |
| O00458 | IFRD1 | 4\|3\|4 | 11 | 3.67 | 41414 | 0 | 0 | 0 | 0 | 0 | −12.55 | 0.92 | 0.92 |
| Q9P2R7-2 | SUCLA2 | 5\|5\|6 | 16 | 5.33 | 10\|7\|6 | 0 | 0 | 0 | 0 | 0 | −22.9 | 0.7 | 0.92 |
| P16615 | ATP2A2 | 16\|13\|13 | 42 | 14 | 14\|15\|21 | 0 | 0 | 0 | 0 | 0 | −42.99 | 0.84 | 0.92 |
| Q9BRS2 | RIOK1 | 0\|0\|2 | 2 | 0.67 | 4\|4\|2 | 0 | 0 | 0 | 0 | 0 | −16.29 | 0.2 | 0.92 |
| Q9P0J0 | NDUFA13 | 0\|2\|0 | 2 | 0.67 | 0\|2\|2 | 0 | 0.01 | 0 | 0.01 | 0 | −7.85 | 0.5 | 0.82 |
| Q12972 | PPP1R8 | 2\|4\|4 | 10 | 3.33 | 5\|3\|5 | 0 | 0 | 0 | 0 | 0 | −15.6 | 0.77 | 0.92 |
| Q9P0J7 | KCMF1 | 4\|4\|5 | 13 | 4.33 | 0\|4\|5 | 0 | 0 | 0 | 0 | 0 | −7.25 | 1.44 | 0.84 |
| P29144 | TPP2 | 6\|0\|5 | 11 | 3.67 | 6\|9\|12 | 0 | 0 | 0 | 0 | 0 | −41.27 | 0.41 | 0.92 |
| P19525 | EIF2AK2 | 4\|3\|6 | 13 | 4.33 | 6\|9\|9 | 0 | 0 | 0 | 0 | 0 | −28.15 | 0.54 | 0.92 |
| Q9UKK9 | NUDT5 | 7\|6\|5 | 18 | 6 | 6\|7\|6 | 0 | 0 | 0 | 0 | 0 | −17.93 | 0.95 | 0.9 |
| Q8IVT2 | MISP | 19\|19\|19 | 57 | 19 | 24\|26\|24 | 0 | 0 | 0 | 0 | 0 | −62.73 | 0.77 | 0.92 |
| P53992 | SEC24C | 9\|8\|8 | 25 | 8.33 | 5\|6\|9 | 0 | 0 | 0 | 0 | 0 | −14.71 | 1.25 | 0.89 |
| Q00839-2 | HNRNPU | 26\|23\|32 | 81 | 27 | 33\|31\|29 | 0 | 0 | 0 | 0 | 0 | −79.63 | 0.87 | 0.92 |
| P14324-2 | FDPS | 4\|4\|4 | 12 | 4 | 6\|5\|5 | 0 | 0 | 0 | 0 | 0 | −15.87 | 0.75 | 0.92 |
| Q00610-2 | CLTC | 27\|23\|28 | 78 | 26 | 28\|26\|29 | 0 | 0 | 0 | 0 | 0 | −67.26 | 0.94 | 0.92 |
| O15355 | PPM1G | 3\|0\|0 | 3 | 1 | 3\|2\|2 | 0 | 0 | 0 | 0 | 0 | −11.98 | 0.43 | 0.85 |
| Q99832 | CCT7 | 20\|24\|21 | 65 | 21.67 | 24\|29\|28 | 0 | 0 | 0 | 0 | 0 | −69.75 | 0.8 | 0.92 |
| P04150-2 | NR3C1 | 2\|2\|4 | 8 | 2.67 | 2\|2\|3 | 0 | 0.01 | 0 | 0.01 | 0 | −8.15 | 1.14 | 0.83 |
| P01111 | NRAS | 9\|3\|6 | 18 | 6 | 4\|3\|6 | 0 | 0 | 0 | 0 | 0 | −13.81 | 1.38 | 0.83 |
| Q9H2P0 | ADNP | 10\|12\|10 | 32 | 10.67 | 19\|18\|15 | 0 | 0 | 0 | 0 | 0 | −50.87 | 0.62 | 0.92 |
| Q9BTE6 | AARSD1 | 3\|4\|6 | 13 | 4.33 | 2\|3\|4 | 0 | 0.01 | 0 | 0.01 | 0 | −9.04 | 1.44 | 0.82 |
| P61978-3 | HNRNPK | 24\|33\|34 | 91 | 30.33 | 35\|43\|39 | 0 | 0 | 0 | 0 | 0 | −108.39 | 0.78 | 0.92 |
| Q13111 | CHAF1A | 11\|7\|11 | 29 | 9.67 | 9\|8\|11 | 0 | 0 | 0 | 0 | 0 | −25.73 | 1.04 | 0.91 |
| P35527 | KRT9 | 69\|47\|11 | 127 | 42.33 | 50\|39\|35 | 0 | 0 | 0 | 0 | 0 | −146.99 | 1.02 | 0.92 |
| P61978 | HNRNPK | 26\|33\|35 | 94 | 31.33 | 35\|44\|39 | 0 | 0 | 0 | 0 | 0 | −105.96 | 0.8 | 0.92 |
| Q9P265 | DIP2B | 2\|0\|2 | 4 | 1.33 | 2\|4\|0 | 0 | 0 | 0 | 0 | 0 | −10.24 | 0.67 | 0.92 |
| Q14247 | CTTN | 15\|13\|17 | 45 | 15 | 14\|11\|14 | 0 | 0 | 0 | 0 | 0 | −29.78 | 1.15 | 0.91 |
| Q14244 | MAP7 | 35\|33\|43 | 111 | 37 | 31\|27\|37 | 0 | 0 | 0 | 0 | 0 | −66.56 | 1.17 | 0.92 |
| Q14240 | EIF4A2 | 22\|21\|24 | 67 | 22.33 | 21\|29\|27 | 0 | 0 | 0 | 0 | 0 | −63.14 | 0.87 | 0.92 |
| Q8IWX8 | CHERP | 0\|2\|0 | 2 | 0.67 | 6\|15\|7 | 0 | 0 | 0 | 0 | 0 | −42.4 | 0.07 | 0.92 |
| P24928 | POLR2A | 4\|4\|4 | 12 | 4 | 5\|5\|7 | 0 | 0 | 0 | 0 | 0 | −17.11 | 0.71 | 0.92 |
| Q9BRJ2 | MRPL45 | 4\|5\|4 | 13 | 4.33 | 4\|2\|4 | 0 | 0 | 0 | 0 | 0 | −8.76 | 1.3 | 0.86 |
| Q5JSZ5 | PRRC2B | 11\|8\|10 | 29 | 9.67 | 10\|7\|9 | 0 | 0 | 0 | 0 | 0 | −21.76 | 1.12 | 0.9 |
| Q13200 | PSMD2 | 10\|13\|15 | 38 | 12.67 | 13\|16\|17 | 0 | 0 | 0 | 0 | 0 | −43.15 | 0.83 | 0.92 |
| P63000 | RAC1 | 7\|7\|8 | 22 | 7.33 | 9\|8\|6 | 0 | 0 | 0 | 0 | 0 | −19.69 | 0.96 | 0.9 |
| Q8N163 | CCAR2 | 24\|21\|19 | 64 | 21.33 | 19\|25\|26 | 0 | 0 | 0 | 0 | 0 | −57.79 | 0.91 | 0.92 |
| Tx0002 | Tx0002 | 645\|609\|601 | 1855 | 618.33 | 642\|671\| | 0 | 0 | 0 | 0 | 0 | #NAME? | 0.93 | 0.92 |
| | | | | | 688 | | | | | | | | |
| Q15758 | SLC1A5 | 4\|6\|3 | 13 | 4.33 | 4\|4\|5 | 0 | 0 | 0 | 0 | 0 | −13.81 | 1 | 0.88 |
| Q8WX93-3 | PALLD | 12\|7\|18 | 37 | 12.33 | 8\|7\|8 | 0 | 0.01 | 0 | 0.01 | 0 | −19.69 | 1.61 | 0.81 |
| O14617-3 | AP3D1 | 3\|0\|2 | 5 | 1.67 | 2\|2\|5 | 0 | 0 | 0 | 0 | 0 | −14.8 | 0.56 | 0.92 |
| Q9GZR7 | DDX24 | 0\|3\|0 | 3 | 1 | 3\|2\|4 | 0 | 0 | 0 | 0 | 0 | −14.8 | 0.33 | 0.92 |
| Q9H4A3-2 | WNK1 | 3\|3\|7 | 13 | 4.33 | 7\|8\|8 | 0 | 0 | 0 | 0 | 0 | −26.82 | 0.57 | 0.92 |
| O15427 | SLC16A3 | 5\|3\|5 | 13 | 4.33 | 3\|2\|4 | 0 | 0 | 0 | 0 | 0 | −9.04 | 1.44 | 0.83 |
| Q9NWB6 | ARGLU1 | 2\|2\|2 | 6 | 2 | 4\|3\|3 | 0 | 0 | 0 | 0 | 0 | −11.76 | 0.6 | 0.92 |
| Q16795 | NDUFA9 | 3\|2\|3 | 8 | 2.67 | 5\|5\|4 | 0 | 0 | 0 | 0 | 0 | −16.93 | 0.57 | 0.92 |
| P62280 | RPS11 | 13\|10\|17 | 40 | 13.33 | 17\|11\|13 | 0 | 0 | 0 | 0 | 0 | −36.85 | 0.98 | 0.91 |
| P45880-2 | VDAC2 | 4\|5\|4 | 13 | 4.33 | 4\|3\|5 | 0 | 0 | 0 | 0 | 0 | −11.11 | 1.08 | 0.88 |
| P25786 | PSMA1 | 3\|2\|2 | 7 | 2.33 | 3\|3\|0 | 0 | 0 | 0 | 0 | 0 | −6.87 | 1.17 | 0.83 |
| Q9NYJ8 | TAB2 | 3\|2\|0 | 5 | 1.67 | 3\|0\|3 | 0 | 0 | 0 | 0 | 0 | −10.39 | 0.83 | 0.83 |
| Q96RP9 | GFM1 | 8\|4\|6 | 18 | 6 | 8\|7\|9 | 0 | 0 | 0 | 0 | 0 | −26.03 | 0.75 | 0.92 |
| O60488-2 | ACSL4 | 2\|3\|4 | 9 | 3 | 3\|4\|2 | 0 | 0 | 0 | 0 | 0 | −10.47 | 1 | 0.86 |
| P61158 | ACTR3 | 9\|9\|11 | 29 | 9.67 | 11\|7\|9 | 0 | 0 | 0 | 0 | 0 | −21.48 | 1.07 | 0.91 |
| P56134-4 | ATP5J2 | 4\|5\|5 | 14 | 4.67 | 5\|4\|3 | 0 | 0 | 0 | 0 | 0 | −11.11 | 1.17 | 0.88 |
| O95602 | POLR1A | 3\|2\|5 | 10 | 3.33 | 7\|7\|7 | 0 | 0 | 0 | 0 | 0 | −26.38 | 0.48 | 0.92 |
| O00178 | GTPBP1 | 2\|0\|0 | 2 | 0.67 | 2\|3\|0 | 0 | 0 | 0 | 0 | 0 | −9.18 | 0.4 | 0.84 |
| Q15054-3 | POLD3 | 3\|2\|2 | 7 | 2.33 | 2\|2\|3 | 0 | 0 | 0 | 0 | 0 | −8.15 | 1 | 0.85 |
| P62191 | PSMC1 | 8\|12\|10 | 30 | 10 | 11\|12\|11 | 0 | 0 | 0 | 0 | 0 | −31.51 | 0.88 | 0.91 |
| P11413 | G6PD | 13\|12\|13 | 38 | 12.67 | 11\|12\|11 | 0 | 0 | 0 | 0 | 0 | −25.35 | 1.12 | 0.91 |
| P12036-2 | NEFH | 3\|2\|2 | 7 | 2.33 | 3\|2\|2 | 0 | 0 | 0 | 0 | 0 | −8.15 | 1 | 0.85 |
| P11142 | HSPA8 | 45\|48\|56 | 149 | 49.67 | 62\|51\|54 | 0 | 0 | 0 | 0 | 0 | −134.65 | 0.89 | 0.92 |
| Q04864-2 | REL | 0\|2\|0 | 2 | 0.67 | 2\|3\|0 | 0 | 0 | 0 | 0 | 0 | −9.18 | 0.4 | 0.84 |
| Q96EK5 | KIF1BP | 2\|2\|3 | 7 | 2.33 | 2\|2\|2 | 0 | 0 | 0 | 0 | 0 | −6.96 | 1.17 | 0.84 |
| Q9BVP2-2 | GNL3 | 4\|2\|3 | 9 | 3 | 6\|7\|5 | 0 | 0 | 0 | 0 | 0 | −22.26 | 0.5 | 0.92 |
| Q13501-2 | SQSTM1 | 11\|9\|8 | 28 | 9.33 | 9\|7\|7 | 0 | 0 | 0 | 0 | 0 | −18.23 | 1.22 | 0.9 |
| P61081 | UBE2M | 8\|5\|9 | 22 | 7.33 | 8\|6\|6 | 0 | 0 | 0 | 0 | 0 | −19.16 | 1.1 | 0.9 |
| P62266 | RPS23 | 2\|2\|2 | 6 | 2 | 4\|3\|3 | 0 | 0 | 0 | 0 | 0 | −11.76 | 0.6 | 0.92 |
| P62263 | RPS14 | 21\|16\|19 | 56 | 18.67 | 20\|16\|18 | 0 | 0 | 0 | 0 | 0 | −43.09 | 1.04 | 0.91 |
| P62269 | RPS18 | 6\|4\|8 | 18 | 6 | 4\|3\|6 | 0 | 0 | 0 | 0 | 0 | −12.29 | 1.38 | 0.85 |
| Q9BR76 | CORO1B | 2\|2\|0 | 4 | 1.33 | 3\|3\|2 | 0 | 0 | 0 | 0 | 0 | −13.44 | 0.5 | 0.92 |
| Q9H2M9 | RAB3GAP2 | 0\|0\|2 | 2 | 0.67 | 2\|0\|2 | 0 | 0.01 | 0 | 0.01 | 0 | −7.85 | 0.5 | 0.82 |
| Q9H0U3 | MAGT1 | 0\|0\|2 | 2 | 0.67 | 2\|0\|2 | 0 | 0.01 | 0 | 0.01 | 0 | −7.85 | 0.5 | 0.82 |
| Q08945 | SSRP1 | 7\|5\|5 | 17 | 5.67 | 9\|5\|4 | 0 | 0 | 0 | 0 | 0 | −16.73 | 0.94 | 0.9 |
| Q9H0A0 | NAT10 | 7\|3\|10 | 20 | 6.67 | 15\|19\|18 | 0 | 0 | 0 | 0 | 0 | −67.47 | 0.38 | 0.92 |
| Q96C36 | PYCR2 | 2\|2\|3 | 7 | 2.33 | 3\|2\|3 | 0 | 0 | 0 | 0 | 0 | −9.34 | 0.88 | 0.87 |
| P07195 | LDHB | 12\|15\|11 | 38 | 12.67 | 11\|12\|12 | 0 | 0 | 0 | 0 | 0 | −27.98 | 1.09 | 0.91 |
| P11498 | PC | 809\|760\|796 | 2365 | 788.33 | 756\|751\| | 0 | 0 | 0 | 0 | 0 | #NAME? | 1.04 | 0.92 |
| | | | | | 768 | | | | | | | | |
| O00330 | PDHX | 4\|2\|4 | 10 | 3.33 | 4\|0\|3 | 0 | 0.01 | 0 | 0.01 | 0 | −7.98 | 1.43 | 0.81 |
| P23396 | RPS3 | 34\|31\|31 | 96 | 32 | 32\|35\|35 | 0 | 0 | 0 | 0 | 0 | −77.76 | 0.94 | 0.92 |
| O95163 | IKBKAP | 3\|3\|4 | 10 | 3.33 | 3\|4\|3 | 0 | 0 | 0 | 0 | 0 | −10.22 | 1 | 0.88 |
| Q96EY5 | MVB12A | 2\|2\|2 | 6 | 2 | 0\|2\|3 | 0 | 0 | 0 | 0 | 0 | −5.71 | 1.2 | 0.81 |
| Q9NXV6 | CDKN2AIP | 4\|4\|9 | 17 | 5.67 | 2\|7\|6 | 0 | 0 | 0 | 0 | 0 | −14.56 | 1.13 | 0.87 |
| P13639 | EEF2 | 69\|52\|79 | 200 | 66.67 | 85\|75\|83 | 0 | 0 | 0 | 0 | 0 | −218.29 | 0.82 | 0.92 |
| P52907 | CAPZA1 | 7\|8\|7 | 22 | 7.33 | 6\|6\|4 | 0 | 0 | 0 | 0 | 0 | −11.48 | 1.38 | 0.88 |
| P62841 | RPS15 | 5\|6\|9 | 20 | 6.67 | 5\|6\|7 | 0 | 0 | 0 | 0 | 0 | −16.7 | 1.11 | 0.89 |
| P15880 | RPS2 | 12\|16\|15 | 43 | 14.33 | 11\|12\|12 | 0 | 0 | 0 | 0 | 0 | −26.53 | 1.23 | 0.91 |
| Q9BXS5 | AP1M1 | 3\|5\|5 | 13 | 4.33 | 6\|8\|8 | 0 | 0 | 0 | 0 | 0 | −25.47 | 0.59 | 0.92 |
| O75330-2 | HMMR | 2\|2\|0 | 4 | 1.33 | 2\|3\|0 | 0 | 0 | 0 | 0 | 0 | −9.18 | 0.8 | 0.83 |
| P55809 | OXCT1 | 12\|11\|15 | 38 | 12.67 | 13\|18\|17 | 0 | 0 | 0 | 0 | 0 | −43.89 | 0.79 | 0.92 |
| Q9Y6Y8 | SEC23IP | 2\|0\|0 | 2 | 0.67 | 3\|2\|2 | 0 | 0 | 0 | 0 | 0 | −11.98 | 0.29 | 0.92 |
| O15160 | POLR1C | 6\|4\|3 | 13 | 4.33 | 4\|5\|6 | 0 | 0 | 0 | 0 | 0 | −16.28 | 0.87 | 0.89 |
| Q99829 | CPNE1 | 5\|6\|4 | 15 | 5 | 9\|9\|10 | 0 | 0 | 0 | 0 | 0 | −31.36 | 0.54 | 0.92 |
| P08243-2 | ASNS | 10\|11\|10 | 31 | 10.33 | 13\|12\|19 | 0 | 0 | 0 | 0 | 0 | −40.61 | 0.7 | 0.92 |
| P78527 | PRKDC | 16\|19\|13 | 48 | 16 | 16\|20\|26 | 0 | 0 | 0 | 0 | 0 | −58.13 | 0.77 | 0.92 |
| Q92747 | ARPC1A | 3\|2\|4 | 9 | 3 | 3\|2\|3 | 0 | 0 | 0 | 0 | 0 | −9.34 | 1.12 | 0.85 |
| O00165-5 | HAX1 | 2\|2\|2 | 6 | 2 | 3\|3\|3 | 0 | 0 | 0 | 0 | 0 | −10.47 | 0.67 | 0.92 |
| O43447-2 | PPIH | 2\|0\|0 | 2 | 0.67 | 2\|2\|0 | 0 | 0.01 | 0 | 0.01 | 0 | −7.85 | 0.5 | 0.82 |
| Q6ULP2-8 | AFTPH | 4\|2\|4 | 10 | 3.33 | 6\|7\|6 | 0 | 0 | 0 | 0 | 0 | −23.65 | 0.53 | 0.92 |
| Q99873-2 | PRMT1 | 5\|5\|6 | 16 | 5.33 | 9\|5\|3 | 0 | 0 | 0 | 0 | 0 | −15.43 | 0.94 | 0.9 |
| P31153 | MAT2A | 7\|10\|7 | 24 | 8 | 9\|10\|8 | 0 | 0 | 0 | 0 | 0 | −24.48 | 0.89 | 0.91 |
| Q6VY07 | PACS1 | 2\|0\|0 | 2 | 0.67 | 0\|2\|5 | 0 | 0 | 0 | 0 | 0 | −11.64 | 0.29 | 0.92 |
| P27448-8 | MARK3 | 0\|0\|2 | 2 | 0.67 | 5\|4\|3 | 0 | 0 | 0 | 0 | 0 | −19.16 | 0.17 | 0.92 |
| P57088 | TMEM33 | 5\|3\|3 | 11 | 3.67 | 4\|5\|2 | 0 | 0 | 0 | 0 | 0 | −11.41 | 1 | 0.87 |
| P61981 | YWHAG | 13\|9\|16 | 38 | 12.67 | 11\|11\|16 | 0 | 0 | 0 | 0 | 0 | −34.8 | 1 | 0.91 |
| Q14258 | TRIM25 | 5\|6\|7 | 18 | 6 | 8\|8\|9 | 0 | 0 | 0 | 0 | 0 | −25.43 | 0.72 | 0.92 |
| Q9UM54-6 | MYO6 | 9\|11\|9 | 29 | 9.67 | 28\|29\|28 | 0 | 0 | 0 | 0 | 0 | −97.72 | 0.34 | 0.92 |
| Q5VTR2 | RNF20 | 3\|6\|6 | 15 | 5 | 6\|5\|8 | 0 | 0 | 0 | 0 | 0 | −21.48 | 0.79 | 0.92 |
| Q9UJS0 | SLC25A13 | 16\|13\|10 | 39 | 13 | 12\|14\|16 | 0 | 0 | 0 | 0 | 0 | −38.08 | 0.93 | 0.91 |
| Q02543 | RPL18A | 7\|7\|10 | 24 | 8 | 10\|6\|9 | 0 | 0 | 0 | 0 | 0 | −22.07 | 0.96 | 0.9 |
| Q6IBS0 | TWF2 | 3\|2\|3 | 8 | 2.67 | 2\|2\|2 | 0 | 0 | 0 | 0 | 0 | −6.96 | 1.33 | 0.83 |
| Q9Y3Y2-4 | CHTOP | 12\|8\|9 | 29 | 9.67 | 9\|10\|8 | 0 | 0 | 0 | 0 | 0 | −22.92 | 1.07 | 0.9 |
| Q6P2E9 | EDC4 | 4\|4\|2 | 10 | 3.33 | 3\|4\|4 | 0 | 0 | 0 | 0 | 0 | −13.04 | 0.91 | 0.88 |
| P49189 | ALDH9A1 | 5\|6\|6 | 17 | 5.67 | 8\|6\|8 | 0 | 0 | 0 | 0 | 0 | −21.63 | 0.77 | 0.92 |
| P39656-3 | DDOST | 2\|0\|3 | 5 | 1.67 | 3\|2\|2 | 0 | 0 | 0 | 0 | 0 | −11.98 | 0.71 | 0.85 |
| Q9NUQ8 | ABCF3 | 3\|2\|4 | 9 | 3 | 3\|3\|4 | 0 | 0 | 0 | 0 | 0 | −11.76 | 0.9 | 0.88 |
| P33176 | KIF5B | 17\|19\|17 | 53 | 17.67 | 20\|17\|18 | 0 | 0 | 0 | 0 | 0 | −42.78 | 0.96 | 0.91 |
| P63104 | YWHAZ | 8\|5\|7 | 20 | 6.67 | 9\|7\|8 | 0 | 0 | 0 | 0 | 0 | −24.14 | 0.83 | 0.92 |
| Q13309 | SKP2 | 2\|2\|3 | 7 | 2.33 | 3\|4\|4 | 0 | 0 | 0 | 0 | 0 | −13.04 | 0.64 | 0.92 |
| Q9ULX3 | NOB1 | 4\|5\|8 | 17 | 5.67 | 4\|5\|4 | 0 | 0 | 0 | 0 | 0 | −12.29 | 1.31 | 0.85 |
| Q71UM5 | RPS27L | 6\|4\|7 | 17 | 5.67 | 9\|7\|5 | 0 | 0 | 0 | 0 | 0 | −22.13 | 0.81 | 0.92 |
| Q14677 | CLINT1 | 6\|4\|5 | 15 | 5 | 4\|5\|5 | 0 | 0 | 0 | 0 | 0 | −13.48 | 1.07 | 0.89 |
| Q96RQ3 | MCCC1 | 93\|91\|98 | 282 | 94 | 107\|113\| | 0 | 0 | 0 | 0 | 0 | −255.13 | 0.87 | 0.92 |
| | | | | | 106 | | | | | | | | |
| P61160 | ACTR2 | 0\|2\|0 | 2 | 0.67 | 5\|0\|0 | 0 | 0.01 | 0 | 0.01 | 0 | −8.81 | 0.4 | 0.83 |
| Q92499 | DDX1 | 9\|9\|8 | 26 | 8.67 | 6\|12\|10 | 0 | 0 | 0 | 0 | 0 | −24.14 | 0.93 | 0.92 |
| Q9H0B6-2 | KLC2 | 3\|3\|0 | 6 | 2 | 2\|3\|3 | 0 | 0 | 0 | 0 | 0 | −13.44 | 0.75 | 0.86 |
| Q7Z2W4 | ZC3HAV1 | 12\|14\|12 | 38 | 12.67 | 16\|13\|21 | 0 | 0 | 0 | 0 | 0 | −44.68 | 0.76 | 0.92 |
| P11177-2 | PDHB | 8\|9\|9 | 26 | 8.67 | 7\|12\|8 | 0 | 0 | 0 | 0 | 0 | −22.92 | 0.96 | 0.92 |
| P55039 | DRG2 | 3\|5\|5 | 13 | 4.33 | 4\|5\|5 | 0 | 0 | 0 | 0 | 0 | −15.06 | 0.93 | 0.89 |
| Q9NSD9 | FARSB | 10\|9\|11 | 30 | 10 | 11\|11\|9 | 0 | 0 | 0 | 0 | 0 | −26.21 | 0.97 | 0.91 |
| Q13490-2 | BIRC2 | 8\|6\|4 | 18 | 6 | 7\|7\|8 | 0 | 0 | 0 | 0 | 0 | −23.44 | 0.82 | 0.9 |
| Q9NZI8 | IGF2BP1 | 5\|7\|11 | 23 | 7.67 | 11\|8\|8 | 0 | 0 | 0 | 0 | 0 | −28 | 0.85 | 0.91 |
| P62070 | RRAS2 | 3\|0\|3 | 6 | 2 | 2\|2\|3 | 0 | 0 | 0 | 0 | 0 | −11.98 | 0.86 | 0.85 |
| Q13573 | SNW1 | 0\|0\|2 | 2 | 0.67 | 8\|9\|5 | 0 | 0 | 0 | 0 | 0 | −33.89 | 0.09 | 0.92 |
| Q92769-3 | HDAC2 | 5\|5\|6 | 16 | 5.33 | 5\|10\|6 | 0 | 0 | 0 | 0 | 0 | −20.36 | 0.76 | 0.92 |
| P62277 | RPS13 | 4\|3\|4 | 11 | 3.67 | 5\|5\|3 | 0 | 0 | 0 | 0 | 0 | −13.81 | 0.85 | 0.92 |
| Q9UJV9 | DDX41 | 5\|5\|5 | 15 | 5 | 6\|4\|5 | 0 | 0 | 0 | 0 | 0 | −13.18 | 1 | 0.92 |
| Q96EP5-2 | DAZAP1 | 0\|3\|0 | 3 | 1 | 2\|2\|3 | 0 | 0 | 0 | 0 | 0 | −11.98 | 0.43 | 0.85 |
| Q53GS9 | USP39 | 2\|4\|3 | 9 | 3 | 2\|5\|4 | 0 | 0 | 0 | 0 | 0 | −13.04 | 0.82 | 0.88 |
| P05023 | ATP1A1 | 6\|5\|11 | 22 | 7.33 | 6\|7\|7 | 0 | 0 | 0 | 0 | 0 | −19.16 | 1.1 | 0.89 |
| Q5T6F2 | UBAP2 | 0\|3\|4 | 7 | 2.33 | 5\|4\|3 | 0 | 0 | 0 | 0 | 0 | −19.16 | 0.58 | 0.92 |
| Q07065 | CKAP4 | 56\|56\|59 | 171 | 57 | 48\|49\|47 | 0 | 0 | 0 | 0 | 0 | −90.87 | 1.19 | 0.92 |
| P37108 | SRP14 | 5\|7\|6 | 18 | 6 | 4\|4\|3 | 0 | 0 | 0 | 0 | 0 | −8.5 | 1.64 | 0.83 |
| P22234 | PAICS | 14\|14\|15 | 43 | 14.33 | 15\|14\|12 | 0 | 0 | 0 | 0 | 0 | −30.67 | 1.05 | 0.91 |
| P50990 | CCT8 | 25\|22\|29 | 76 | 25.33 | 42\|50\|44 | 0 | 0 | 0 | 0 | 0 | −137.42 | 0.56 | 0.92 |
| Q16401-2 | PSMD5 | 2\|2\|2 | 6 | 2 | 3\|0\|3 | 0 | 0 | 0 | 0 | 0 | −6.87 | 1 | 0.92 |
| P31040 | SDHA | 14\|13\|16 | 43 | 14.33 | 20\|17\|19 | 0 | 0 | 0 | 0 | 0 | −50.49 | 0.77 | 0.92 |
| P51153 | RAB13 | 4\|3\|5 | 12 | 4 | 6\|5\|5 | 0 | 0 | 0 | 0 | 0 | −17.58 | 0.75 | 0.92 |
| P51151 | RAB9A | 4\|2\|3 | 9 | 3 | 3\|3\|3 | 0 | 0 | 0 | 0 | 0 | −10.47 | 1 | 0.86 |
| O00303 | EIF3F | 8\|11\|10 | 29 | 9.67 | 11\|12\|11 | 0 | 0 | 0 | 0 | 0 | −31.51 | 0.85 | 0.92 |
| P02786 | TFRC | 0\|0\|2 | 2 | 0.67 | 0\|3\|4 | 0 | 0 | 0 | 0 | 0 | −11.81 | 0.29 | 0.92 |
| P21796 | VDAC1 | 4\|3\|4 | 11 | 3.67 | 3\|2\|2 | 0 | 0.01 | 0 | 0.01 | 0 | −6.68 | 1.57 | 0.81 |
| O14579 | COPE | 6\|8\|8 | 22 | 7.33 | 8\|10\|7 | 0 | 0 | 0 | 0 | 0 | −23.68 | 0.88 | 0.92 |
| Q9UL25 | RAB21 | 4\|3\|5 | 12 | 4 | 5\|7\|4 | 0 | 0 | 0 | 0 | 0 | −17.58 | 0.75 | 0.92 |
| P0DMV9 | HSPA1B | 51\|48\|51 | 150 | 50 | 46\|41\|40 | 0 | 0 | 0 | 0 | 0 | −82.45 | 1.18 | 0.92 |
| P18621 | RPL17 | 8\|5\|9 | 22 | 7.33 | 5\|5\|8 | 0 | 0 | 0 | 0 | 0 | −16.7 | 1.22 | 0.89 |
| P62854 | RPS26 | 6\|4\|5 | 15 | 5 | 5\|5\|7 | 0 | 0 | 0 | 0 | 0 | −17.11 | 0.88 | 0.9 |
| P52597 | HNRNPF | 29\|22\|23 | 74 | 24.67 | 28\|31\|32 | 0 | 0 | 0 | 0 | 0 | −78.85 | 0.81 | 0.92 |
| P17655 | CAPN2 | 8\|4\|7 | 19 | 6.33 | 7\|10\|6 | 0 | 0 | 0 | 0 | 0 | −24.75 | 0.83 | 0.9 |
| P09211 | GSTP1 | 3\|3\|4 | 10 | 3.33 | 5\|5\|4 | 0 | 0 | 0 | 0 | 0 | −15.06 | 0.71 | 0.92 |
| Q13310-2 | PABPC4 | 2\|0\|0 | 2 | 0.67 | 2\|3\|4 | 0 | 0 | 0 | 0 | 0 | −14.8 | 0.22 | 0.92 |
| Q9BZX2 | UCK2 | 0\|2\|2 | 4 | 1.33 | 5\|4\|3 | 0 | 0 | 0 | 0 | 0 | −19.16 | 0.33 | 0.92 |
| A1X283 | SH3PXD2B | 2\|2\|4 | 8 | 2.67 | 7\|6\|6 | 0 | 0 | 0 | 0 | 0 | −23.65 | 0.42 | 0.92 |
| Q9H974-2 | QTRT2 | 2\|2\|0 | 4 | 1.33 | 2\|4\|4 | 0 | 0 | 0 | 0 | 0 | −16.29 | 0.4 | 0.92 |
| Q15020 | SART3 | 9\|6\|4 | 19 | 6.33 | 13\|4\|6 | 0 | 0 | 0 | 0 | 0 | −24.37 | 0.83 | 0.9 |
| Q9Y277 | VDAC3 | 6\|10\|7 | 23 | 7.67 | 8\|8\|8 | 0 | 0 | 0 | 0 | 0 | −22.42 | 0.96 | 0.9 |
| Q14914-2 | PTGR1 | 6\|5\|6 | 17 | 5.67 | 2\|3\|7 | 0 | 0 | 0 | 0 | 0 | −9.48 | 1.42 | 0.86 |
| Q8NI27 | THOC2 | 0\|0\|3 | 3 | 1 | 5\|3\|4 | 0 | 0 | 0 | 0 | 0 | −19.16 | 0.25 | 0.92 |
| P63092-3 | GNAS | 4\|4\|4 | 12 | 4 | 3\|4\|4 | 0 | 0 | 0 | 0 | 0 | −9.93 | 1.09 | 0.88 |
| Q9GZL7 | WDR12 | 4\|6\|6 | 16 | 5.33 | 4\|8\|7 | 0 | 0 | 0 | 0 | 0 | −19.6 | 0.84 | 0.92 |
| P30453 | HLA-A | 4\|2\|0 | 6 | 2 | 5\|3\|0 | 0 | 0 | 0 | 0 | 0 | −13.21 | 0.75 | 0.85 |
| P35610 | SOAT1 | 3\|3\|2 | 8 | 2.67 | 2\|2\|3 | 0 | 0 | 0 | 0 | 0 | −8.15 | 1.14 | 0.85 |
| P00403 | MT-CO2 | 2\|3\|3 | 8 | 2.67 | 4\|4\|2 | 0 | 0 | 0 | 0 | 0 | −11.76 | 0.8 | 0.92 |
| P17812 | CTPS1 | 12\|9\|12 | 33 | 11 | 11\|9\|10 | 0 | 0 | 0 | 0 | 0 | −25 | 1.1 | 0.91 |
| Q641Q2-2 | WASHC2A | 2\|3\|2 | 7 | 2.33 | 2\|3\|5 | 0 | 0 | 0 | 0 | 0 | −11.76 | 0.7 | 0.92 |
| P08670 | VIM | 60\|58\|65 | 183 | 61 | 74\|76\|70 | 0 | 0 | 0 | 0 | 0 | −178.64 | 0.83 | 0.92 |
| P32969 | RPL9P8; | 10\|8\|10 | 28 | 9.33 | 9\|13\|21 | 0 | 0 | 0 | 0 | 0 | −42.67 | 0.65 | 0.92 |
| | RPL9; | | | | | | | | | | | | |
| | RPL9P7; | | | | | | | | | | | | |
| | RPL9 | | | | | | | | | | | | |
| Q13177 | PAK2 | 6\|7\|10 | 23 | 7.67 | 6\|7\|7 | 0 | 0 | 0 | 0 | 0 | −17.62 | 1.15 | 0.89 |
| P42224 | STAT1 | 3\|8\|8 | 19 | 6.33 | 14\|8\|9 | 0 | 0 | 0 | 0 | 0 | −37.77 | 0.61 | 0.92 |
| Q8TA86 | RP9 | 0\|0\|2 | 2 | 0.67 | 2\|2\|2 | 0 | 0 | 0 | 0 | 0 | −10.49 | 0.33 | 0.92 |
| P04792 | HSPB1 | 18\|17\|19 | 54 | 18 | 18\|20\|15 | 0 | 0 | 0 | 0 | 0 | −40.42 | 1.02 | 0.91 |
| O43684-2 | BUB3 | 12\|11\|12 | 35 | 11.67 | 16\|13\|11 | 0 | 0 | 0 | 0 | 0 | −33.97 | 0.87 | 0.92 |
| Q14203-3 | DCTN1 | 14\|12\|14 | 40 | 13.33 | 16\|13\|13 | 0 | 0 | 0 | 0 | 0 | −34.81 | 0.95 | 0.92 |
| Q09666 | AHNAK | 157\|168\|173 | 498 | 166 | 209\|239\| | 0 | 0 | 0 | 0 | 0 | −561.04 | 0.75 | 0.92 |
| | | | | | 213 | | | | | | | | |
| Q15424-2 | SAFB | 3\|5\|2 | 10 | 3.33 | 9\|7\|9 | 0 | 0 | 0 | 0 | 0 | −31.96 | 0.4 | 0.92 |
| Q7LBC6 | KDM3B | 2\|0\|3 | 5 | 1.67 | 5\|3\|3 | 0 | 0 | 0 | 0 | 0 | −17.76 | 0.45 | 0.92 |
| O15091-2 | KIAA0391 | 2\|0\|0 | 2 | 0.67 | 0\|2\|2 | 0 | 0.01 | 0 | 0.01 | 0 | −7.85 | 0.5 | 0.82 |
| Q9BUK6-7 | MSTO1 | 2\|0\|0 | 2 | 0.67 | 2\|2\|0 | 0 | 0.01 | 0 | 0.01 | 0 | −7.85 | 0.5 | 0.82 |
| P55209-3 | NAP1L1 | 3\|3\|3 | 9 | 3 | 0\|3\|3 | 0 | 0 | 0 | 0 | 0 | −5.41 | 1.5 | 0.81 |
| P14625 | HSP90B1 | 6\|4\|10 | 20 | 6.67 | 7\|6\|6 | 0 | 0 | 0 | 0 | 0 | −19.6 | 1.05 | 0.89 |
| P62140 | PPP1CB | 9\|8\|8 | 25 | 8.33 | 7\|9\|9 | 0 | 0 | 0 | 0 | 0 | −20.58 | 1 | 0.91 |
| P13929-3 | ENO3 | 6\|6\|5 | 17 | 5.67 | 3\|6\|6 | 0 | 0 | 0 | 0 | 0 | −13.18 | 1.13 | 0.89 |
| Q6UWE0 | LRSAM1 | 4\|6\|5 | 15 | 5 | 9\|11\|5 | 0 | 0 | 0 | 0 | 0 | −27.42 | 0.6 | 0.92 |
| Q969U7-2 | PSMG2 | 3\|2\|4 | 9 | 3 | 4\|4\|3 | 0 | 0 | 0 | 0 | 0 | −13.04 | 0.82 | 0.88 |
| Q96SB4-4 | SRPK1 | 3\|0\|4 | 7 | 2.33 | 4\|3\|5 | 0 | 0 | 0 | 0 | 0 | −19.16 | 0.58 | 0.92 |
| Q86TX2 | ACOT1 | 0\|0\|2 | 2 | 0.67 | 4\|3\|2 | 0 | 0 | 0 | 0 | 0 | −14.8 | 0.22 | 0.92 |
| Q6RFH5 | WDR74 | 0\|0\|2 | 2 | 0.67 | 3\|8\|4 | 0 | 0 | 0 | 0 | 0 | −23.49 | 0.13 | 0.92 |
| P09651-3 | HNRNPA1 | 3\|5\|5 | 13 | 4.33 | 6\|8\|12 | 0 | 0 | 0 | 0 | 0 | −30.96 | 0.5 | 0.92 |
| Q8WUM0 | NUP133 | 6\|6\|4 | 16 | 5.33 | 6\|7\|6 | 0 | 0 | 0 | 0 | 0 | −19.6 | 0.84 | 0.92 |
| P07237 | P4HB | 4\|5\|4 | 13 | 4.33 | 2\|4\|3 | 0 | 0 | 0 | 0 | 0 | −7.59 | 1.44 | 0.84 |
| P47756-2 | CAPZB | 6\|9\|10 | 25 | 8.33 | 13\|7\|11 | 0 | 0 | 0 | 0 | 0 | −31.29 | 0.81 | 0.92 |
| Q9H9A6 | LRRC40 | 10\|10\|11 | 31 | 10.33 | 14\|7\|11 | 0 | 0 | 0 | 0 | 0 | −25.94 | 0.97 | 0.91 |
| P11387 | TOP1 | 4\|5\|5 | 14 | 4.67 | 7\|4\|4 | 0 | 0 | 0 | 0 | 0 | −14.62 | 0.93 | 0.92 |
| Q9UG63 | ABCF2 | 12\|12\|17 | 41 | 13.67 | 10\|13\|11 | 0 | 0 | 0 | 0 | 0 | −25.35 | 1.21 | 0.9 |
| P04899 | GNAI2 | 3\|4\|4 | 11 | 3.67 | 4\|4\|3 | 0 | 0 | 0 | 0 | 0 | −11.41 | 1 | 0.88 |
| P06493 | CDK1 | 14\|13\|14 | 41 | 13.67 | 9\|11\|6 | 0 | 0 | 0 | 0 | 0 | −14.63 | 1.58 | 0.89 |
| Q02978-2 | SLC25A11 | 0\|0\|3 | 3 | 1 | 3\|2\|2 | 0 | 0 | 0 | 0 | 0 | −11.98 | 0.43 | 0.85 |
| P11766 | ADH5 | 0\|4\|0 | 4 | 1.33 | 2\|3\|2 | 0 | 0.01 | 0 | 0.01 | 0 | −11.98 | 0.57 | 0.83 |
| O43491-4 | EPB41L2 | 4\|3\|2 | 9 | 3 | 4\|3\|4 | 0 | 0 | 0 | 0 | 0 | −13.04 | 0.82 | 0.88 |
| P62847-2 | RPS24 | 7\|5\|5 | 17 | 5.67 | 7\|4\|6 | 0 | 0 | 0 | 0 | 0 | −15.55 | 1 | 0.89 |
| P05787 | KRT8 | 61\|52\|57 | 170 | 56.67 | 47\|56\|53 | 0 | 0 | 0 | 0 | 0 | −110.66 | 1.09 | 0.92 |
| P05783 | KRT18 | 41\|47\|45 | 133 | 44.33 | 34\|41\|34 | 0 | 0 | 0 | 0 | 0 | −71.45 | 1.22 | 0.92 |
| P11169 | SLC2A3 | 2\|0\|0 | 2 | 0.67 | 2\|0\|3 | 0 | 0 | 0 | 0 | 0 | −9.18 | 0.4 | 0.84 |
| Q9Y520-4 | PRRC2C | 5\|6\|5 | 16 | 5.33 | 11\|5\|12 | 0 | 0 | 0 | 0 | 0 | −29.21 | 0.57 | 0.92 |
| P47914 | RPL29 | 3\|4\|5 | 12 | 4 | 4\|4\|4 | 0 | 0 | 0 | 0 | 0 | −12.55 | 1 | 0.88 |
| Q8WX19 | GATAD2B | 2\|4\|0 | 6 | 2 | 5\|4\|5 | 0 | 0 | 0 | 0 | 0 | −22.13 | 0.43 | 0.92 |
| O43318-2 | MAP3K7 | 4\|0\|4 | 8 | 2.67 | | 0 | 0 | 0 | 0 | 0 | −13.27 | 1 | 0.84 |
| P61513 | RPL37A | 3\|2\|3 | 8 | 2.67 | 3\|2\|3 | 0 | 0 | 0 | 0 | 0 | −9.34 | 1 | 0.86 |
| Q9UBQ0 | VPS29 | 0\|2\|2 | 4 | 1.33 | 2\|2\|2 | 0 | 0 | 0 | 0 | 0 | −10.49 | 0.67 | 0.92 |
| Q9NQT5-2 | EXOSC3 | 3\|0\|0 | 3 | 1 | 3\|2\|3 | 0 | 0 | 0 | 0 | 0 | −13.44 | 0.38 | 0.87 |
| Q13546 | RIPK1 | 4\|2\|0 | 6 | 2 | 0\|4\|4 | 0 | 0 | 0 | 0 | 0 | −13.27 | 0.75 | 0.85 |
| Q13547 | HDAC1 | 2\|3\|4 | 9 | 3 | 6\|4\|3 | 0 | 0 | 0 | 0 | 0 | −15.6 | 0.69 | 0.92 |
| P62241 | RPS8 | 12\|11\|15 | 38 | 12.67 | 16\|15\|15 | 0 | 0 | 0 | 0 | 0 | −41.38 | 0.83 | 0.92 |
| P62244 | RPS15A | 9\|12\|13 | 34 | 11.33 | 11\|11\|13 | 0 | 0 | 0 | 0 | 0 | −31.08 | 0.97 | 0.91 |
| P50454 | SERPINH1 | 12\|17\|16 | 45 | 15 | 18\|16\|16 | 0 | 0 | 0 | 0 | 0 | −44.68 | 0.9 | 0.91 |
| P62249 | RPS16 | 12\|11\|14 | 37 | 12.33 | 12\|12\|12 | 0 | 0 | 0 | 0 | 0 | −29.15 | 1.03 | 0.91 |
| Q9Y316-2 | MEMO1 | 0\|2\|2 | 4 | 1.33 | 0\|2\|4 | 0 | 0 | 0 | 0 | 0 | −10.24 | 0.67 | 0.92 |
| P12236 | SLC25A6 | 15\|10\|11 | 36 | 12 | 12\|14\|12 | 0 | 0 | 0 | 0 | 0 | −33.13 | 0.95 | 0.91 |
| P12235 | SLC25A4 | 9\|6\|7 | 22 | 7.33 | 6\|8\|6 | 0 | 0 | 0 | 0 | 0 | −17.62 | 1.1 | 0.9 |
| Q96J01 | THOC3 | 3\|3\|0 | 6 | 2 | 4\|3\|3 | 0 | 0 | 0 | 0 | 0 | −16.29 | 0.6 | 0.92 |
| Q9NP64-2 | ZCCHC17 | 3\|3\|4 | 10 | 3.33 | 6\|8\|7 | 0 | 0 | 0 | 0 | 0 | −24.11 | 0.48 | 0.92 |
| O60506-4 | SYNCRIP | 5\|5\|5 | 15 | 5 | 7\|8\|10 | 0 | 0 | 0 | 0 | 0 | −25.43 | 0.6 | 0.92 |
| Q8IY81 | FTSJ3 | 2\|0\|0 | 2 | 0.67 | 2\|3\|2 | 0 | 0 | 0 | 0 | 0 | −11.98 | 0.29 | 0.92 |
| Q09028-4 | RBBP4 | 3\|0\|2 | 5 | 1.67 | 5\|6\|4 | 0 | 0 | 0 | 0 | 0 | −23.55 | 0.33 | 0.92 |
| O94986-3 | CEP152 | 0\|2\|3 | 5 | 1.67 | 2\|2\|4 | 0 | 0 | 0 | 0 | 0 | −13.44 | 0.63 | 0.87 |
| P34931 | HSPA1L | 20\|16\|16 | 52 | 17.33 | 13\|15\|15 | 0 | 0 | 0 | 0 | 0 | −30.13 | 1.21 | 0.91 |
| Q96EN8 | MOCOS | 3\|5\|5 | 13 | 4.33 | 3\|5\|4 | 0 | 0 | 0 | 0 | 0 | −12.55 | 1.08 | 0.88 |
| P51149 | RAB7A | 13\|11\|11 | 35 | 11.67 | 13\|11\|14 | 0 | 0 | 0 | 0 | 0 | −31.55 | 0.92 | 0.91 |
| P51148 | RAB5C | 6\|4\|7 | 17 | 5.67 | 9\|7\|9 | 0 | 0 | 0 | 0 | 0 | −27.37 | 0.68 | 0.92 |
| P05166 | PCCB | 9\|9\|10 | 28 | 9.33 | 24\|22\|20 | 0 | 0 | 0 | 0 | 0 | −71.6 | 0.42 | 0.92 |
| P05165 | PCCA | 130\|120\|122 | 372 | 124 | 175\|170\| | 0 | 0 | 0 | 0 | 0 | −459.64 | 0.7 | 0.92 |
| | | | | | 184 | | | | | | | | |
| P53621 | COPA | 17\|13\|23 | 53 | 17.67 | 24\|16\|21 | 0 | 0 | 0 | 0 | 0 | −56.84 | 0.87 | 0.92 |
| O95573 | ACSL3 | 7\|6\|14 | 27 | 9 | 13\|11\|9 | 0 | 0 | 0 | 0 | 0 | −33.87 | 0.82 | 0.91 |
| P10412 | HIST1H1E | 3\|6\|4 | 13 | 4.33 | 8\|6\|3 | 0 | 0 | 0 | 0 | 0 | −18.92 | 0.76 | 0.9 |
| Q9UHD8-7 | 9-Sep | 12\|7\|13 | 32 | 10.67 | 10\|11\|15 | 0 | 0 | 0 | 0 | 0 | −35.85 | 0.89 | 0.91 |
| Q9P2E9 | RRBP1 | 4\|4\|12 | 20 | 6.67 | 10\|9\|10 | 0 | 0 | 0 | 0 | 0 | −32.71 | 0.69 | 0.91 |
| P30050 | RPL12 | 10\|7\|9 | 26 | 8.67 | 6\|5\|9 | 0 | 0 | 0 | 0 | 0 | −16.16 | 1.3 | 0.89 |
| P35998 | PSMC2 | 18\|16\|18 | 52 | 17.33 | 14\|20\|17 | 0 | 0 | 0 | 0 | 0 | −39.52 | 1.02 | 0.91 |
| P55795 | HNRNPH2 | 23\|18\|23 | 64 | 21.33 | 25\|25\|33 | 0 | 0 | 0 | 0 | 0 | −75.83 | 0.77 | 0.92 |
| P55084-2 | HADHB | 5\|4\|2 | 11 | 3.67 | 3\|3\|4 | 0 | 0 | 0 | 0 | 0 | −11.76 | 1.1 | 0.86 |
| P08729 | KRT7 | 37\|37\|42 | 116 | 38.67 | 45\|43\|41 | 0 | 0 | 0 | 0 | 0 | −101.02 | 0.9 | 0.92 |
| Q9NNW5 | WDR6 | 0\|0\|2 | 2 | 0.67 | 3\|2\|2 | 0 | 0 | 0 | 0 | 0 | −11.98 | 0.29 | 0.92 |
| Q07157-2 | TJP1 | 0\|0\|2 | 2 | 0.67 | 0\|3\|3 | 0 | 0 | 0 | 0 | 0 | −10.39 | 0.33 | 0.92 |
| Q9HAU0-5 | PLEKHA5 | 0\|0\|2 | 2 | 0.67 | 2\|4\|3 | 0 | 0 | 0 | 0 | 0 | −14.8 | 0.22 | 0.92 |
| Q13409-3 | DYNC112 | 3\|7\|7 | 17 | 5.67 | 5\|6\|8 | 0 | 0 | 0 | 0 | 0 | −21.48 | 0.89 | 0.9 |
| O14979 | HNRNPDL | 5\|5\|5 | 15 | 5 | 6\|5\|8 | 0 | 0 | 0 | 0 | 0 | −17.93 | 0.79 | 0.92 |
| Q86UK7-2 | ZNF598 | 6\|6\|9 | 21 | 7 | 9\|9\|6 | 0 | 0 | 0 | 0 | 0 | −22.42 | 0.88 | 0.9 |
| Q8WWI1-3 | LM07 | 5\|4\|8 | 17 | 5.67 | 10\|12\|15 | 0 | 0 | 0 | 0 | 0 | −43.61 | 0.46 | 0.92 |
| Q99567 | NUP88 | 5\|3\|6 | 14 | 4.67 | 5\|9\|9 | 0 | 0 | 0 | 0 | 0 | −26.82 | 0.61 | 0.92 |
| O15144 | ARPC2 | 4\|3\|3 | 10 | 3.33 | 3\|5\|4 | 0 | 0 | 0 | 0 | 0 | −12.55 | 0.83 | 0.92 |
| O15145 | ARPC3 | 4\|3\|3 | 10 | 3.33 | 4\|5\|3 | 0 | 0 | 0 | 0 | 0 | −12.55 | 0.83 | 0.92 |
| Q96KP4 | CNDP2 | 8\|6\|8 | 22 | 7.33 | 6\|7\|6 | 0 | 0 | 0 | 0 | 0 | −16.44 | 1.16 | 0.89 |
| Q9Y266 | NUDC | 2\|2\|3 | 7 | 2.33 | 3\|0\|3 | 0 | 0 | 0 | 0 | 0 | −6.87 | 1.17 | 0.83 |
| Q9Y265 | RUVBL1 | 6\|6\|6 | 18 | 6 | 6\|4\|4 | 0 | 0 | 0 | 0 | 0 | −10.57 | 1.29 | 0.88 |
| Q9Y263 | PLAA | 13\|6\|11 | 30 | 10 | 12\|10\|11 | 0 | 0 | 0 | 0 | 0 | −33.87 | 0.91 | 0.91 |
| Q08211 | DHX9 | 33\|33\|35 | 101 | 33.67 | 43\|43\|44 | 0 | 0 | 0 | 0 | 0 | −108.8 | 0.78 | 0.92 |
| Q5TFE4 | NT5DC1 | 3\|3\|4 | 10 | 3.33 | 6\|7\|9 | 0 | 0 | 0 | 0 | 0 | −25.47 | 0.45 | 0.92 |
| Q8TAT6 | NPLOC4 | 11\|7\|4 | 22 | 7.33 | 4\|9\|7 | 0 | 0 | 0 | 0 | 0 | −20.88 | 1.1 | 0.89 |
| P21333-2 | FLNA | 49\|34\|37 | 120 | 40 | 55\|48\|50 | 0 | 0 | 0 | 0 | 0 | −136.08 | 0.78 | 0.92 |
| P46777 | RPL5 | 28\|32\|36 | 96 | 32 | 33\|35\|29 | 0 | 0 | 0 | 0 | 0 | −76.37 | 0.99 | 0.92 |
| O43823 | AKAP8 | 6\|2\|3 | 11 | 3.67 | 8\|6\|5 | 0 | 0 | 0 | 0 | 0 | −23.65 | 0.58 | 0.92 |
| Q01085-2 | TIAL1 | 11\|6\|7 | 24 | 8 | 7\|7\|6 | 0 | 0 | 0 | 0 | 0 | −17.62 | 1.2 | 0.89 |
| Q96RT1-7 | ERBIN | 0\|2\|0 | 2 | 0.67 | 2\|0\|3 | 0 | 0 | 0 | 0 | 0 | −9.18 | 0.4 | 0.84 |
| Q99798 | ACO2 | 6\|2\|0 | 8 | 2.67 | 10\|7\|9 | 0 | 0 | 0 | 0 | 0 | −39.81 | 0.31 | 0.92 |
| Q13148 | TARDBP | 6\|5\|9 | 20 | 6.67 | 9\|11\|10 | 0 | 0 | 0 | 0 | 0 | −31.92 | 0.67 | 0.92 |
| Q13144 | EIF2B5 | 2\|2\|0 | 4 | 1.33 | 2\|2\|3 | 0 | 0 | 0 | 0 | 0 | −11.98 | 0.57 | 0.92 |
| P35237 | SERPINB6 | 6\|6\|8 | 20 | 6.67 | 8\|4\|7 | 0 | 0 | 0 | 0 | 0 | −16.44 | 1.05 | 0.9 |
| Q92785 | DPF2 | 2\|0\|0 | 2 | 0.67 | 0\|2\|2 | 0 | 0.01 | 0 | 0.01 | 0 | −7.85 | 0.5 | 0.82 |
| P52789 | HK2 | 4\|3\|4 | 11 | 3.67 | 6\|5\|5 | 0 | 0 | 0 | 0 | 0 | −17.58 | 0.69 | 0.92 |
| P54578-2 | USP14 | 6\|4\|4 | 14 | 4.67 | 6\|4\|5 | 0 | 0 | 0 | 0 | 0 | −14.62 | 0.93 | 0.89 |
| Q01469 | FABP5 | 4\|2\|5 | 11 | 3.67 | 3\|3\|3 | 0 | 0 | 0 | 0 | 0 | −10.47 | 1.22 | 0.85 |
| P62888 | RPL30 | 7\|4\|6 | 17 | 5.67 | 8\|7\|7 | 0 | 0 | 0 | 0 | 0 | −23.44 | 0.77 | 0.92 |
| O43175 | PHGDH | 2\|2\|2 | 6 | 2 | 3\|2\|2 | 0 | 0 | 0 | 0 | 0 | −8.15 | 0.86 | 0.92 |
| Q8IYW5 | RNF168 | 0\|0\|2 | 2 | 0.67 | 2\|3\|0 | 0 | 0 | 0 | 0 | 0 | −9.18 | 0.4 | 0.84 |
| P52209-2 | PGD | 4\|4\|0 | 8 | 2.67 | 3\|2\|7 | 0 | 0 | 0 | 0 | 0 | −18.99 | 0.67 | 0.92 |
| P26599 | PTBP1 | 8\|7\|10 | 25 | 8.33 | 9\|11\|14 | 0 | 0 | 0 | 0 | 0 | −33.29 | 0.74 | 0.92 |
| O43395 | PRPF3 | 2\|0\|0 | 2 | 0.67 | 6\|4\|4 | 0 | 0 | 0 | 0 | 0 | −22.13 | 0.14 | 0.92 |
| Q13557-12 | CAMK2D | 0\|0\|2 | 2 | 0.67 | 2\|2\|2 | 0 | 0 | 0 | 0 | 0 | −10.49 | 0.33 | 0.92 |
| P12956 | XRCC6 | 24\|26\|23 | 73 | 24.33 | 30\|27\|26 | 0 | 0 | 0 | 0 | 0 | −67.26 | 0.88 | 0.92 |
| P23526 | AHCY | 33\|33\|35 | 101 | 33.67 | 32\|36\|36 | 0 | 0 | 0 | 0 | 0 | −77.14 | 0.97 | 0.92 |
| P23527 | HIST1H2BO | 3\|3\|5 | 11 | 3.67 | 7\|9\|6 | 0 | 0 | 0 | 0 | 0 | −25.47 | 0.5 | 0.92 |
| P09874 | PARP1 | 31\|24\|30 | 85 | 28.33 | 44\|38\|42 | 0 | 0 | 0 | 0 | 0 | −117.49 | 0.69 | 0.92 |
| P23528 | CFL1 | 14\|11\|11 | 36 | 12 | 12\|12\|18 | 0 | 0 | 0 | 0 | 0 | −36.4 | 0.86 | 0.92 |
| Q96PK6-5 | RBM14 | 5\|6\|6 | 17 | 5.67 | 7\|7\|6 | 0 | 0 | 0 | 0 | 0 | −19.16 | 0.85 | 0.92 |
| P19388 | POLR2E | 2\|0\|2 | 4 | 1.33 | 0\|3\|3 | 0 | 0 | 0 | 0 | 0 | −10.39 | 0.67 | 0.92 |
| O14828-2 | SCAMP3 | 6\|0\|3 | 9 | 3 | 8\|6\|9 | 0 | 0 | 0 | 0 | 0 | −35.37 | 0.39 | 0.92 |
| Q14697 | GANAB | 13\|19\|15 | 47 | 15.67 | 18\|19\|16 | 0 | 0 | 0 | 0 | 0 | −46.72 | 0.89 | 0.91 |
| P19387 | POLR2C | 5\|4\|5 | 14 | 4.67 | 4\|3\|3 | 0 | 0 | 0 | 0 | 0 | −8.76 | 1.4 | 0.85 |
| Q9NW64 | RBM22 | 4\|6\|3 | 13 | 4.33 | 4\|7\|8 | 0 | 0 | 0 | 0 | 0 | −21.48 | 0.68 | 0.92 |
| P37802 | TAGLN2 | 17\|18\|16 | 51 | 17 | 19\|18\|20 | 0 | 0 | 0 | 0 | 0 | −46.71 | 0.89 | 0.92 |
| Q93009-3 | USP7 | 6\|5\|9 | 20 | 6.67 | 8\|9\|10 | 0 | 0 | 0 | 0 | 0 | −28 | 0.74 | 0.92 |
| P36507 | MAP2K2 | 2\|2\|4 | 8 | 2.67 | 3\|3\|2 | 0 | 0 | 0 | 0 | 0 | −9.34 | 1 | 0.85 |
| Q15654 | TRIP6 | 9\|5\|14 | 28 | 9.33 | 9\|10\|10 | 0 | 0 | 0 | 0 | 0 | −30.63 | 0.97 | 0.9 |
| P36873 | PPP1CC | 8\|7\|7 | 22 | 7.33 | 6\|8\|10 | 0 | 0 | 0 | 0 | 0 | −20.85 | 0.92 | 0.92 |
| Q9UPT8 | ZC3H4 | 4\|4\|4 | 12 | 4 | 6\|4\|3 | 0 | 0 | 0 | 0 | 0 | −12.29 | 0.92 | 0.92 |
| Q3MHD2 | LSM12 | 2\|3\|3 | 8 | 2.67 | 3\|2\|3 | 0 | 0 | 0 | 0 | 0 | −9.34 | 1 | 0.86 |
| Q6DD87 | ZNF787 | 0\|0\|2 | 2 | 0.67 | 5\|0\|2 | 0 | 0 | 0 | 0 | 0 | −11.64 | 0.29 | 0.92 |
| Q6DD88 | ATL3 | 2\|0\|0 | 2 | 0.67 | 3\|0\|3 | 0 | 0 | 0 | 0 | 0 | −10.39 | 0.33 | 0.92 |
| Q9Y5Q8-2 | GTF3C5 | 0\|0\|2 | 2 | 0.67 | 5\|5\|4 | 0 | 0 | 0 | 0 | 0 | −22.13 | 0.14 | 0.92 |
| Q5GLZ8-6 | HERC4 | 0\|2\|0 | 2 | 0.67 | 0\|2\|2 | 0 | 0.01 | 0 | 0.01 | 0 | −7.85 | 0.5 | 0.82 |
| Q9BRA2 | TXNDC17 | 0\|2\|0 | 2 | 0.67 | 2\|3\|2 | 0 | 0 | 0 | 0 | 0 | −11.98 | 0.29 | 0.92 |
| Q8WXF1 | PSPC1 | 4\|5\|4 | 13 | 4.33 | 2\|3\|5 | 0 | 0 | 0 | 0 | 0 | −8.76 | 1.3 | 0.86 |
| Q9BQ04 | RBM4B | 4\|2\|2 | 8 | 2.67 | 4\|2\|5 | 0 | 0 | 0 | 0 | 0 | −13.04 | 0.73 | 0.88 |
| Q9UBU8-2 | MORF4L1 | 4\|4\|3 | 11 | 3.67 | 2\|3\|3 | 0 | 0 | 0 | 0 | 0 | −7.86 | 1.38 | 0.84 |
| P22695 | UQCRC2 | 6\|7\|4 | 17 | 5.67 | 11\|10\|11 | 0 | 0 | 0 | 0 | 0 | −36.77 | 0.53 | 0.92 |
| P22694 | PRKACB | 4\|3\|0 | 7 | 2.33 | 2\|4\|3 | 0 | 0 | 0 | 0 | 0 | −14.8 | 0.78 | 0.86 |
| Q16555-2 | DPYSL2 | 7\|10\|9 | 26 | 8.67 | 5\|8\|6 | 0 | 0 | 0 | 0 | 0 | −14.98 | 1.37 | 0.89 |
| P11021 | HSPA5 | 18\|11\|11 | 40 | 13.33 | 14\|19\|16 | 0 | 0 | 0 | 0 | 0 | −45.17 | 0.82 | 0.91 |
| Q13620-1 | CUL4B | 3\|0\|3 | 6 | 2 | 0\|5\|5 | 0 | 0 | 0 | 0 | 0 | −15.97 | 0.6 | 0.92 |
| Q96CW1-2 | AP2M1 | 4\|2\|5 | 11 | 3.67 | 4\|2\|4 | 0 | 0 | 0 | 0 | 0 | −11.76 | 1.1 | 0.86 |
| Q13885 | TUBB2A | 86\|88\|87 | 261 | 87 | 100\|93\|91 | 0 | 0 | 0 | 0 | 0 | −212.04 | 0.92 | 0.92 |
| O00148 | DDX39A | 13\|13\|9 | 35 | 11.67 | 12\|12\|12 | 0 | 0 | 0 | 0 | 0 | −32.29 | 0.97 | 0.91 |
| Q9BW19 | KIFC1 | 4\|2\|2 | 8 | 2.67 | 2\|4\|3 | 0 | 0 | 0 | 0 | 0 | −10.47 | 0.89 | 0.86 |
| P48643 | CCT5 | 33\|30\|31 | 94 | 31.33 | 35\|43\|44 | 0 | 0 | 0 | 0 | 0 | −103.93 | 0.77 | 0.92 |
| Q15942 | ZYX | 4\|5\|8 | 17 | 5.67 | 6\|7\|6 | 0 | 0 | 0 | 0 | 0 | −19.6 | 0.89 | 0.9 |
| P49790 | NUP153 | 24\|23\|25 | 72 | 24 | 27\|29\|26 | 0 | 0 | 0 | 0 | 0 | −66.04 | 0.88 | 0.92 |
| Q14807-2 | KIF22 | 0\|3\|4 | 7 | 2.33 | 5\|4\|3 | 0 | 0 | 0 | 0 | 0 | −19.16 | 0.58 | 0.92 |
| O75179-7 | ANKRD17 | 8\|5\|11 | 24 | 8 | 6\|11\|10 | 0 | 0 | 0 | 0 | 0 | −28 | 0.89 | 0.91 |
| P30041 | PRDX6 | 8\|8\|9 | 25 | 8.33 | 7\|6\|6 | 0 | 0 | 0 | 0 | 0 | −13.55 | 1.32 | 0.89 |
| Q8TEU7-5 | RAPGEF6 | 0\|0\|2 | 2 | 0.67 | 2\|2\|2 | 0 | 0 | 0 | 0 | 0 | −10.49 | 0.33 | 0.92 |
| Q9Y678 | COPG1 | 19\|16\|13 | 48 | 16 | 13\|12\|14 | 0 | 0 | 0 | 0 | 0 | −29.78 | 1.23 | 0.91 |
| Q9Y679 | AUP1 | 5\|3\|0 | 8 | 2.67 | 4\|7\|4 | 0 | 0 | 0 | 0 | 0 | −23.55 | 0.53 | 0.92 |
| P50579-3 | METAP2 | 4\|0\|4 | 8 | 2.67 | 3\|3\|4 | 0 | 0 | 0 | 0 | 0 | −16.29 | 0.8 | 0.87 |
| P55786 | NPEPPS | 2\|4\|3 | 9 | 3 | 4\|4\|4 | 0 | 0 | 0 | 0 | 0 | −14.26 | 0.75 | 0.92 |
| P37837 | TALDO1 | 4\|3\|5 | 12 | 4 | 2\|4\|2 | 0 | 0.01 | 0 | 0.01 | 0 | −7.86 | 1.5 | 0.83 |
| Q16637-4 | SMN2; | 0\|3\|2 | 5 | 1.67 | 4\|3\|0 | 0 | 0 | 0 | 0 | 0 | −11.81 | 0.71 | 0.85 |
| | SMN1 | | | | | | | | | | | | |
| Q9NP72 | RAB18 | 2\|3\|4 | 9 | 3 | 4\|4\|5 | 0 | 0 | 0 | 0 | 0 | −15.6 | 0.69 | 0.92 |
| Q9NP77 | SSU72 | 2\|0\|0 | 2 | 0.67 | 2\|4\|4 | 0 | 0 | 0 | 0 | 0 | −16.29 | 0.2 | 0.92 |
| P62879 | GNB2 | 3\|3\|5 | 11 | 3.67 | 3\|3\|5 | 0 | 0 | 0 | 0 | 0 | −11.41 | 1 | 0.87 |
| Q9NRR4-2 | DROSHA | 3\|4\|3 | 10 | 3.33 | 3\|2\|3 | 0 | 0 | 0 | 0 | 0 | −7.86 | 1.25 | 0.85 |
| Q15003 | NCAPH | 9\|9\|4 | 22 | 7.33 | 6\|5\|6 | 0 | 0 | 0 | 0 | 0 | −17.11 | 1.29 | 0.88 |
| Q9C0C2 | TNKS1BP1 | 3\|3\|4 | 10 | 3.33 | 6\|4\|4 | 0 | 0 | 0 | 0 | 0 | −15.06 | 0.71 | 0.92 |
| Q15796-2 | SMAD2 | 2\|0\|0 | 2 | 0.67 | 2\|2\|2 | 0 | 0 | 0 | 0 | 0 | −10.49 | 0.33 | 0.92 |
| Q6KB66-2 | KRT80 | 2\|0\|0 | 2 | 0.67 | 3\|2\|0 | 0 | 0 | 0 | 0 | 0 | −9.18 | 0.4 | 0.84 |
| Q9UKG1 | APPL1 | 4\|3\|4 | 11 | 3.67 | 4\|2\|5 | 0 | 0 | 0 | 0 | 0 | −11.41 | 1 | 0.88 |
| Q06210-2 | GFPT1 | 13\|16\|20 | 49 | 16.33 | 18\|18\|19 | 0 | 0 | 0 | 0 | 0 | −49.22 | 0.89 | 0.91 |
| P18085 | ARF4 | 6\|9\|7 | 22 | 7.33 | 8\|3\|8 | 0 | 0 | 0 | 0 | 0 | −16.41 | 1.16 | 0.89 |
| O75821 | EIF3G | 2\|0\|0 | 2 | 0.67 | 2\|2\|4 | 0 | 0 | 0 | 0 | 0 | −13.44 | 0.25 | 0.92 |
| P30044-2 | PRDX5 | 5\|3\|4 | 12 | 4 | 3\|5\|4 | 0 | 0 | 0 | 0 | 0 | −12.55 | 1 | 0.88 |
| P78371-2 | CCT2 | 3\|2\|0 | 5 | 1.67 | 3\|3\|4 | 0 | 0 | 0 | 0 | 0 | −16.29 | 0.5 | 0.92 |
| Q9UGI8-2 | TES | 7\|9\|15 | 31 | 10.33 | 13\|11\|10 | 0 | 0 | 0 | 0 | 0 | −33.29 | 0.91 | 0.91 |
| Q5VV41 | ARHGEF16 | 6\|5\|7 | 18 | 6 | 7\|6\|10 | 0 | 0 | 0 | 0 | 0 | −22.9 | 0.78 | 0.92 |
| Q5VV42 | CDKAL1 | 2\|0\|0 | 2 | 0.67 | 3\|3\|0 | 0 | 0 | 0 | 0 | 0 | −10.39 | 0.33 | 0.92 |
| P04222 | HLA-C | 2\|3\|0 | 5 | 1.67 | 3\|5\|3 | 0 | 0 | 0 | 0 | 0 | −17.76 | 0.45 | 0.92 |
| P68104 | EEF1A1 | 68\|59\|64 | 191 | 63.67 | 74\|94\|97 | 0 | 0 | 0 | 0 | 0 | −233.41 | 0.72 | 0.92 |
| P27635 | RPL10 | 18\|18\|20 | 56 | 18.67 | 21\|22\|19 | 0 | 0 | 0 | 0 | 0 | 49.65 | 0.9 | 0.92 |
| Q9UHB9-4 | SRP68 | 3\|2\|3 | 8 | 2.67 | 3\|2\|4 | 0 | 0 | 0 | 0 | 0 | −10.47 | 0.89 | 0.92 |
| Q9Y2H6-2 | FNDC3A | 0\|3\|4 | 7 | 2.33 | 4\|2\|9 | 0 | 0 | 0 | 0 | 0 | −23.18 | 0.47 | 0.92 |
| Q9Y450 | HBS1L | 8\|4\|5 | 17 | 5.67 | 8\|10\|7 | 0 | 0 | 0 | 0 | 0 | −27.37 | 0.68 | 0.92 |
| Q92804-2 | TAF15 | 4\|4\|12 | 20 | 6.67 | 15\|12\|10 | 0 | 0 | 0 | 0 | 0 | −43.61 | 0.54 | 0.92 |
| Q5BKZ1 | ZNF326 | 3\|2\|3 | 8 | 2.67 | 5\|2\|5 | 0 | 0 | 0 | 0 | 0 | −14.26 | 0.67 | 0.92 |
| Q6L8Q7-2 | PDE12 | 5\|4\|5 | 14 | 4.67 | 7\|6\|8 | 0 | 0 | 0 | 0 | 0 | −22.13 | 0.67 | 0.92 |
| Q8NFH4 | NUP37 | 0\|0\|3 | 3 | 1 | 0\|3\|3 | 0 | 0 | 0 | 0 | 0 | −10.39 | 0.5 | 0.83 |
| Q13151 | HNRNPAO | 5\|8\|10 | 23 | 7.67 | 7\|7\|7 | 0 | 0 | 0 | 0 | 0 | −20.36 | 1.1 | 0.9 |
| Q13155 | AIMP2 | 2\|0\|2 | 4 | 1.33 | 3\|3\|2 | 0 | 0 | 0 | 0 | 0 | −13.44 | 0.5 | 0.92 |
| Q14192 | FHL2 | 5\|5\|6 | 16 | 5.33 | 6\|5\|5 | 0 | 0 | 0 | 0 | 0 | −14.36 | 1 | 0.9 |
| Q86TC9 | MYPN | 6\|4\|7 | 17 | 5.67 | 3\|4\|3 | 0 | 0.01 | 0 | 0.01 | 0 | −8.76 | 1.7 | 0.81 |
| P62891 | RPL39 | 4\|3\|3 | 10 | 3.33 | 6\|3\|2 | 0 | 0 | 0 | 0 | 0 | −11.42 | 0.91 | 0.89 |
| Q14204 | DYNC1H1 | 21\|21\|31 | 73 | 24.33 | 32\|26\|26 | 0 | 0 | 0 | 0 | 0 | −71.79 | 0.87 | 0.92 |
| P00338 | LDHA | 19\|16\|14 | 49 | 16.33 | 15\|15\|14 | 0 | 0 | 0 | 0 | 0 | −34.2 | 1.11 | 0.91 |
| Q92841 | DDX17 | 48\|47\|49 | 144 | 48 | 54\|53\|50 | 0 | 0 | 0 | 0 | 0 | −119.29 | 0.92 | 0.92 |
| P68032 | ACTC1 | 62\|62\|69 | 193 | 64.33 | 82\|78\|72 | 0 | 0 | 0 | 0 | 0 | −186.85 | 0.83 | 0.92 |
| P07814 | EPRS | 22\|23\|37 | 82 | 27.33 | 40\|30\|35 | 0 | 0 | 0 | 0 | 0 | −96.67 | 0.78 | 0.92 |
| P22102 | GART | 11\|11\|13 | 35 | 11.67 | 8\|9\|12 | 0 | 0 | 0 | 0 | 0 | −20.94 | 1.21 | 0.9 |
| O75643 | SNRNP200 | 5\|3\|5 | 13 | 4.33 | 12\|17\|14 | 0 | 0 | 0 | 0 | 0 | −54.63 | 0.3 | 0.92 |
| Q15185-4 | PTGES3 | 4\|4\|3 | 11 | 3.67 | 4\|4\|5 | 0 | 0 | 0 | 0 | 0 | −13.81 | 0.85 | 0.92 |
| Q8WWY3 | PRPF31 | 3\|2\|3 | 8 | 2.67 | 5\|4\|5 | 0 | 0 | 0 | 0 | 0 | −16.93 | 0.57 | 0.92 |
| O60271-4 | SPAG9 | 5\|5\|5 | 15 | 5 | 8\|6\|10 | 0 | 0 | 0 | 0 | 0 | −24.14 | 0.62 | 0.92 |
| P00761 | P00761 | 26\|28\|22 | 76 | 25.33 | 31\|24\|25 | 0 | 0 | 0 | 0 | 0 | −65.2 | 0.95 | 0.92 |
| Q12931-2 | TRAP1 | 20\|21\|25 | 66 | 22 | 26\|24\|29 | 0 | 0 | 0 | 0 | 0 | −67.26 | 0.84 | 0.92 |
| Q14739 | LBR | 9\|5\|6 | 20 | 6.67 | 9\|8\|7 | 0 | 0 | 0 | 0 | 0 | −24.14 | 0.83 | 0.9 |
| P61106 | RAB14 | 9\|12\|10 | 31 | 10.33 | 14\|16\|18 | 0 | 0 | 0 | 0 | 0 | −47.59 | 0.65 | 0.92 |
| Q9UNQ2 | DIMT1 | 3\|2\|2 | 7 | 2.33 | 3\|2\|3 | 0 | 0 | 0 | 0 | 0 | −9.34 | 0.88 | 0.87 |
| O43491 | EPB41L2 | 5\|4\|4 | 13 | 4.33 | 6\|3\|7 | 0 | 0 | 0 | 0 | 0 | −15.87 | 0.81 | 0.92 |
| P11586 | MTHFD1 | 5\|3\|6 | 14 | 4.67 | 6\|6\|5 | 0 | 0 | 0 | 0 | 0 | −18.88 | 0.82 | 0.9 |
| P61353 | RPL27 | 13\|13\|14 | 40 | 13.33 | 14\|14\|12 | 0 | 0 | 0 | 0 | 0 | −30.95 | 1 | 0.91 |
| O14828 | SCAMP3 | 4\|0\|3 | 7 | 2.33 | 10\|8\|7 | 0 | 0 | 0 | 0 | 0 | −38.32 | 0.28 | 0.92 |
| P38919 | EIF4A3 | 10\|12\|16 | 38 | 12.67 | 18\|24\|24 | 0 | 0 | 0 | 0 | 0 | −69.39 | 0.58 | 0.92 |
| Q15645 | TRIP13 | 6\|9\|8 | 23 | 7.67 | 8\|6\|6 | 0 | 0 | 0 | 0 | 0 | −17.62 | 1.15 | 0.9 |
| Q13423 | NNT | 9\|4\|9 | 22 | 7.33 | 11\|9\|12 | 0 | 0 | 0 | 0 | 0 | −36.77 | 0.69 | 0.92 |
| Q7Z794 | KRT77 | 5\|5\|0 | 10 | 3.33 | 5\|7\|5 | 0 | 0 | 0 | 0 | 0 | −26.53 | 0.59 | 0.92 |
| P35080-2 | PFN2 | 4\|4\|4 | 12 | 4 | 4\|5\|4 | 0 | 0 | 0 | 0 | 0 | −12.29 | 0.92 | 0.92 |
| P62081 | RPS7 | 24\|19\|27 | 70 | 23.33 | 18\|21\|25 | 0 | 0 | 0 | 0 | 0 | −50.51 | 1.09 | 0.91 |
| P48735 | IDH2 | 4\|0\|3 | 7 | 2.33 | 4\|2\|3 | 0 | 0 | 0 | 0 | 0 | −14.8 | 0.78 | 0.86 |
| O15371-2 | EIF3D | 29\|22\|30 | 81 | 27 | 29\|24\|23 | 0 | 0 | 0 | 0 | 0 | −60.33 | 1.07 | 0.92 |
| Q9NR45 | NANS | 0\|0\|2 | 2 | 0.67 | 3\|2\|3 | 0 | 0 | 0 | 0 | 0 | −13.44 | 0.25 | 0.92 |
| P84098 | RPL19 | 8\|10\|13 | 31 | 10.33 | 12\|6\|8 | 0 | 0 | 0 | 0 | 0 | −21.82 | 1.19 | 0.9 |
| Q9Y697-2 | NFS1 | 4\|0\|5 | 9 | 3 | 4\|2\|4 | 0 | 0 | 0 | 0 | 0 | −16.29 | 0.9 | 0.86 |
| P84090 | ERH | 3\|0\|0 | 3 | 1 | 4\|2\|2 | 0 | 0 | 0 | 0 | 0 | −13.44 | 0.38 | 0.87 |
| Q15269 | PWP2 | 3\|4\|3 | 10 | 3.33 | 0\|4\|4 | 0 | 0 | 0 | 0 | 0 | −7.6 | 1.25 | 0.84 |
| P84095 | RHOG | 3\|3\|3 | 9 | 3 | 4\|3\|3 | 0 | 0 | 0 | 0 | 0 | −10.22 | 0.9 | 0.92 |
| P07355 | ANXA2 | 6\|4\|8 | 18 | 6 | 6\|5\|5 | 0 | 0 | 0 | 0 | 0 | −15.87 | 1.12 | 0.89 |
| Q8TDN6 | BRIX1 | 0\|0\|2 | 2 | 0.67 | 2\|2\|0 | 0 | 0.01 | 0 | 0.01 | 0 | −7.85 | 0.5 | 0.82 |
| P62136 | PPP1CA | 10\|10\|10 | 30 | 10 | 9\|9\|11 | 0 | 0 | 0 | 0 | 0 | −22.38 | 1.03 | 0.91 |
| O00487 | PSMD14 | 4\|3\|4 | 11 | 3.67 | 2\|4\|5 | 0 | 0 | 0 | 0 | 0 | −11.41 | 1 | 0.88 |
| Q8NC51-4 | SERBP1 | 4\|4\|6 | 14 | 4.67 | 4\|3\|4 | 0 | 0 | 0 | 0 | 0 | −9.93 | 1.27 | 0.86 |
| P05141 | SLC25A5 | 13\|10\|13 | 36 | 12 | 13\|15\|11 | 0 | 0 | 0 | 0 | 0 | −34.35 | 0.92 | 0.92 |
| Q9UQ80 | PA2G4 | 42\|26\|37 | 105 | 35 | 37\|36\|31 | 0 | 0 | 0 | 0 | 0 | −88.26 | 1.01 | 0.92 |
| O14545 | TRAFD1 | 2\|2\|2 | 6 | 2 | 3\|0\|2 | 0 | 0 | 0 | 0 | 0 | −5.71 | 1.2 | 0.81 |
| Q14683 | SMC1A | 6\|5\|10 | 21 | 7 | 8\|10\|6 | 0 | 0 | 0 | 0 | 0 | −24.14 | 0.88 | 0.9 |
| P04818-2 | TYMS | 4\|3\|5 | 12 | 4 | 4\|4\|3 | 0 | 0 | 0 | 0 | 0 | −11.41 | 1.09 | 0.87 |
| P47712 | PLA2G4A | 4\|2\|4 | 10 | 3.33 | 6\|4\|4 | 0 | 0 | 0 | 0 | 0 | −16.93 | 0.71 | 0.92 |
| Q9BV38 | WDR18 | 8\|5\|5 | 18 | 6 | 4\|6\|5 | 0 | 0 | 0 | 0 | 0 | −13.18 | 1.2 | 0.88 |
| Q96EE3 | SEH1L | 6\|4\|7 | 17 | 5.67 | 5\|7\|6 | 0 | 0 | 0 | 0 | 0 | −18.31 | 0.94 | 0.9 |
| Q9Y666 | SLC12A7 | 2\|2\|3 | 7 | 2.33 | 2\|4\|0 | 0 | 0.01 | 0 | 0.01 | 0 | −6.72 | 1.17 | 0.83 |
| Q9UBE0 | SAE1 | 4\|6\|7 | 17 | 5.67 | 9\|8\|9 | 0 | 0 | 0 | 0 | 0 | −28.7 | 0.65 | 0.92 |
| Q92900-2 | UPF1 | 14\|12\|18 | 44 | 14.67 | 17\|19\|19 | 0 | 0 | 0 | 0 | 0 | −51 | 0.8 | 0.92 |
| Q969S3 | ZNF622 | 6\|5\|8 | 19 | 6.33 | 5\|6\|4 | 0 | 0 | 0 | 0 | 0 | −13.18 | 1.27 | 0.88 |
| Q16891-2 | IMMT | 2\|2\|4 | 8 | 2.67 | 4\|6\|0 | 0 | 0 | 0 | 0 | 0 | −11.39 | 0.8 | 0.87 |
| O00571 | DDX3X | 60\|41\|50 | 151 | 50.33 | 51\|53\|68 | 0 | 0 | 0 | 0 | 0 | −147.58 | 0.88 | 0.92 |
| P14866 | HNRNPL | 30\|34\|39 | 103 | 34.33 | 43\|43\|45 | 0 | 0 | 0 | 0 | 0 | −115.29 | 0.79 | 0.92 |
| P52594-2 | AGFG1 | 3\|5\|5 | 13 | 4.33 | 5\|6\|5 | 0 | 0 | 0 | 0 | 0 | −17.58 | 0.81 | 0.92 |
| P14868 | DARS | 9\|12\|10 | 31 | 10.33 | 13\|14\|10 | 0 | 0 | 0 | 0 | 0 | −33.55 | 0.84 | 0.92 |
| O15027-5 | SEC16A | 14\|11\|15 | 40 | 13.33 | 21\|20\|21 | 0 | 0 | 0 | 0 | 0 | −61.99 | 0.65 | 0.92 |
| Q5T200-2 | ZC3H13 | 8\|4\|7 | 19 | 6.33 | 7\|5\|5 | 0 | 0 | 0 | 0 | 0 | −17.11 | 1.12 | 0.89 |
| P31947-2 | SFN | 3\|2\|2 | 7 | 2.33 | 2\|4\|2 | 0 | 0 | 0 | 0 | 0 | −9.34 | 0.88 | 0.87 |
| Q08123 | NSUN2 | 7\|16\|13 | 36 | 12 | 16\|12\|14 | 0 | 0 | 0 | 0 | 0 | −43.71 | 0.86 | 0.91 |
| P0DPH8 | PODPH8 | 69\|55\|65 | 189 | 63 | 69\|63\|66 | 0 | 0 | 0 | 0 | 0 | −156.46 | 0.95 | 0.92 |
| Q9Y446 | PKP3 | 5\|4\|3 | 12 | 4 | 5\|5\|5 | 0 | 0 | 0 | 0 | 0 | −16.28 | 0.8 | 0.92 |
| O60678-2 | PRMT3 | 5\|6\|4 | 15 | 5 | 4\|2\|5 | 0 | 0 | 0 | 0 | 0 | −9.93 | 1.36 | 0.86 |
| Q969V3-2 | NCLN | 3\|5\|3 | 11 | 3.67 | 4\|5\|2 | 0 | 0 | 0 | 0 | 0 | −11.41 | 1 | 0.87 |
| Q9Y3A5 | SBDS | 10\|10\|11 | 31 | 10.33 | 14\|13\|12 | 0 | 0 | 0 | 0 | 0 | −34.35 | 0.79 | 0.92 |
| P15170-2 | GSPT1 | 5\|5\|6 | 16 | 5.33 | 6\|8\|7 | 0 | 0 | 0 | 0 | 0 | −20.36 | 0.76 | 0.92 |
| P42677 | RPS27 | 7\|7\|7 | 21 | 7 | 11\|7\|6 | 0 | 0 | 0 | 0 | 0 | −20.85 | 0.88 | 0.92 |
| Q04760 | GLO1 | 11\|8\|11 | 30 | 10 | 12\|11\|9 | 0 | 0 | 0 | 0 | 0 | −29.02 | 0.94 | 0.91 |
| Q5VT66-3 | 1-Mar | 5\|3\|5 | 13 | 4.33 | 4\|5\|3 | 0 | 0 | 0 | 0 | 0 | −12.55 | 1.08 | 0.88 |
| Q01082 | SPTBN1 | 4\|6\|5 | 15 | 5 | 7\|8\|7 | 0 | 0 | 0 | 0 | 0 | −23.44 | 0.68 | 0.92 |
| Q01081 | U2AF1 | 3\|9\|7 | 19 | 6.33 | 9\|6\|8 | 0 | 0 | 0 | 0 | 0 | −26.82 | 0.83 | 0.9 |
| P26373 | RPL13 | 25\|27\|28 | 80 | 26.67 | 28\|22\|23 | 0 | 0 | 0 | 0 | 0 | −52.31 | 1.1 | 0.92 |
| P42704 | LRPPRC | 0\|4\|4 | 8 | 2.67 | 4\|7\|4 | 0 | 0 | 0 | 0 | 0 | −23.55 | 0.53 | 0.92 |
| O43719 | HTATSF1 | 4\|2\|3 | 9 | 3 | 3\|3\|5 | 0 | 0 | 0 | 0 | 0 | −13.04 | 0.82 | 0.88 |
| P35637-2 | FUS | 3\|6\|7 | 16 | 5.33 | 6\|11\|11 | 0 | 0 | 0 | 0 | 0 | −33.63 | 0.57 | 0.92 |
| P27816-4 | MAP4 | 9\|9\|8 | 26 | 8.67 | 23\|14\|15 | 0 | 0 | 0 | 0 | 0 | −54.87 | 0.5 | 0.92 |
| Q14687-2 | GSE1 | 6\|7\|9 | 22 | 7.33 | 6\|5\|7 | 0 | 0 | 0 | 0 | 0 | −15.26 | 1.22 | 0.89 |
| P52272-2 | HNRNPM | 6\|3\|4 | 13 | 4.33 | 8\|8\|12 | 0 | 0 | 0 | 0 | 0 | −33.63 | 0.46 | 0.92 |
| Q9UHI6 | DDX20 | 0\|4\|5 | 9 | 3 | 3\|2\|3 | 0 | 0.01 | 0 | 0.01 | 0 | −13.44 | 1.12 | 0.83 |
| P46977 | STT3A | 4\|3\|3 | 10 | 3.33 | 0\|4\|3 | 0 | 0.01 | 0 | 0.01 | 0 | −6.46 | 1.43 | 0.81 |
| Q9H9B4 | SFXN1 | 4\|5\|8 | 17 | 5.67 | 8\|7\|7 | 0 | 0 | 0 | 0 | 0 | −23.44 | 0.77 | 0.9 |
| Q8NDV7-2 | TNRC6A | 9\|18\|12 | 39 | 13 | 8\|6\|12 | 0 | 0 | 0 | 0 | 0 | −20.37 | 1.5 | 0.86 |
| P34932 | HSPA4 | 14\|8\|12 | 34 | 11.33 | 5\|5\|8 | 0 | 0.01 | 0 | 0.01 | 0 | −12.39 | 1.89 | 0.81 |
| P82675 | MRPS5 | 4\|2\|5 | 11 | 3.67 | 4\|3\|4 | 0 | 0 | 0 | 0 | 0 | −13.04 | 1 | 0.87 |
| Q8IXB1-2 | DNAJC10 | 0\|0\|2 | 2 | 0.67 | 3\|4\|3 | 0 | 0 | 0 | 0 | 0 | −16.29 | 0.2 | 0.92 |
| P21291 | CSRP1 | 9\|8\|5 | 22 | 7.33 | 8\|8\|8 | 0 | 0 | 0 | 0 | 0 | −24.14 | 0.92 | 0.9 |
| P26358-2 | DNMT1 | 13\|17\|16 | 46 | 15.33 | 18\|16\|16 | 0 | 0 | 0 | 0 | 0 | −42.99 | 0.92 | 0.91 |
| Q8IWA0 | WDR75 | 5\|2\|3 | 10 | 3.33 | 4\|7\|9 | 0 | 0 | 0 | 0 | 0 | −25.03 | 0.5 | 0.92 |
| O95456-2 | PSMG1 | 4\|5\|6 | 15 | 5 | 6\|6\|8 | 0 | 0 | 0 | 0 | 0 | −20.88 | 0.75 | 0.92 |
| P46779-4 | RPL28 | 12\|13\|20 | 45 | 15 | 11\|10\|12 | 0 | 0 | 0 | 0 | 0 | −24.18 | 1.36 | 0.9 |
| Q04695 | KRT17 | 54\|45\|40 | 139 | 46.33 | 41\|38\|46 | 0 | 0 | 0 | 0 | 0 | −91.66 | 1.11 | 0.92 |
| Q8NI36 | WDR36 | 0\|4\|5 | 9 | 3 | 7\|5\|12 | 0 | 0 | 0 | 0 | 0 | −36.69 | 0.38 | 0.92 |
| Q71RC2-3 | LARP4 | 11\|12\|14 | 37 | 12.33 | 17\|13\|8 | 0 | 0 | 0 | 0 | 0 | −31.43 | 0.97 | 0.91 |
| Q96A08 | HIST1H2BA | 0\|0\|3 | 3 | 1 | 3\|2\|0 | 0 | 0.01 | 0 | 0.01 | 0 | −9.18 | 0.6 | 0.81 |
| Q8NE71-2 | ABCF1 | 7\|5\|7 | 19 | 6.33 | 13\|10\|11 | 0 | 0 | 0 | 0 | 0 | −37.26 | 0.56 | 0.92 |
| P31930 | UQCRC1 | 8\|6\|7 | 21 | 7 | 14\|15\|12 | 0 | 0 | 0 | 0 | 0 | −44.49 | 0.51 | 0.92 |
| P04844 | RPN2 | 11\|10\|9 | 30 | 10 | 11\|8\|14 | 0 | 0 | 0 | 0 | 0 | −28.61 | 0.91 | 0.92 |
| P04843 | RPN1 | 14\|15\|16 | 45 | 15 | 14\|15\|15 | 0 | 0 | 0 | 0 | 0 | −34.2 | 1.02 | 0.91 |
| P55265 | ADAR | 12\|13\|14 | 39 | 13 | 18\|23\|17 | 0 | 0 | 0 | 0 | 0 | −54.84 | 0.67 | 0.92 |
| Q15366-6 | PCBP2 | 27\|20\|32 | 79 | 26.33 | 22\|25\|27 | 0 | 0 | 0 | 0 | 0 | −61.08 | 1.07 | 0.92 |
| O95235-2 | KIF20A | 0\|3\|4 | 7 | 2.33 | 4\|8\|6 | 0 | 0 | 0 | 0 | 0 | −27.96 | 0.39 | 0.92 |
| P61221 | ABCE1 | 5\|5\|4 | 14 | 4.67 | 6\|5\|5 | 0 | 0 | 0 | 0 | 0 | −15.87 | 0.88 | 0.92 |
| P61254 | RPL26 | 16\|11\|12 | 39 | 13 | 16\|11\|13 | 0 | 0 | 0 | 0 | 0 | −33.97 | 0.97 | 0.91 |
| P27694 | RPA1 | 21\|9\|14 | 44 | 14.67 | 12\|10\|19 | 0 | 0 | 0 | 0 | 0 | −38.46 | 1.07 | 0.91 |
| Q15459 | SF3A1 | 42\|36\|37 | 115 | 38.33 | 44\|37\|47 | 0 | 0 | 0 | 0 | 0 | −101.4 | 0.9 | 0.92 |
| Q96EY1-2 | DNAJA3 | 3\|3\|4 | 10 | 3.33 | 5\|7\|5 | 0 | 0 | 0 | 0 | 0 | −18.88 | 0.59 | 0.92 |
| P55072 | VCP | 10\|7\|9 | 26 | 8.67 | 8\|4\|4 | 0 | 0 | 0 | 0 | 0 | −11.48 | 1.62 | 0.86 |
| P51571 | SSR4 | 4\|4\|3 | 11 | 3.67 | 3\|4\|3 | 0 | 0 | 0 | 0 | 0 | −10.22 | 1.1 | 0.87 |
| P51572 | BCAP31 | 3\|5\|6 | 14 | 4.67 | 5\|7\|7 | 0 | 0 | 0 | 0 | 0 | −21.48 | 0.74 | 0.92 |
| P06737-2 | PYGL | 0\|0\|3 | 3 | 1 | 6\|7\|5 | 0 | 0 | 0 | 0 | 0 | −27.96 | 0.17 | 0.92 |
| P13861-2 | PRKAR2A | 2\|4\|2 | 8 | 2.67 | 3\|6\|7 | 0 | 0 | 0 | 0 | 0 | −19.58 | 0.5 | 0.92 |
| Q9BYD1 | MRPL13 | 3\|3\|0 | 6 | 2 | 2\|3\|3 | 0 | 0 | 0 | 0 | 0 | −13.44 | 0.75 | 0.86 |
| P13645 | KRT10 | 43\|41\|20 | 104 | 34.67 | 38\|58\|36 | 0 | 0 | 0 | 0 | 0 | −135.86 | 0.79 | 0.92 |
| P13647 | KRT5 | 32\|12\|8 | 52 | 17.33 | 18\|17\|11 | 0 | 0 | 0 | 0 | 0 | −46.96 | 1.13 | 0.89 |
| Q9BTE3-2 | MCMBP | 4\|3\|5 | 12 | 4 | 6\|6\|4 | 0 | 0 | 0 | 0 | 0 | −17.58 | 0.75 | 0.92 |
| Q07020 | RPL18 | 12\|11\|12 | 35 | 11.67 | 14\|14\|14 | 0 | 0 | 0 | 0 | 0 | −36.4 | 0.83 | 0.92 |
| Q9NSE4 | IARS2 | 16\|13\|15 | 44 | 14.67 | 14\|18\|15 | 0 | 0 | 0 | 0 | 0 | −39.32 | 0.94 | 0.91 |
| Q9NYF8-3 | BCLAF1 | 2\|3\|6 | 11 | 3.67 | 4\|2\|4 | 0 | 0 | 0 | 0 | 0 | −11.76 | 1.1 | 0.85 |
| Q03252 | LMNB2 | 0\|0\|4 | 4 | 1.33 | 3\|5\|3 | 0 | 0 | 0 | 0 | 0 | −17.76 | 0.36 | 0.88 |
| P17612 | PRKACA | 3\|3\|3 | 9 | 3 | 6\|4\|4 | 0 | 0 | 0 | 0 | 0 | −15.06 | 0.64 | 0.92 |
| Q5SW79 | CEP170 | 6\|5\|4 | 15 | 5 | 7\|6\|10 | 0 | 0 | 0 | 0 | 0 | −24.75 | 0.65 | 0.92 |
| Q04917 | YWHAH | 5\|4\|3 | 12 | 4 | 4\|5\|9 | 0 | 0 | 0 | 0 | 0 | −20.17 | 0.67 | 0.92 |
| Q9Y230 | RUVBL2 | 16\|15\|12 | 43 | 14.33 | 17\|15\|18 | 0 | 0 | 0 | 0 | 0 | −44.68 | 0.86 | 0.92 |
| Q92974-3 | ARHGEF2 | 4\|6\|7 | 17 | 5.67 | 8\|11\|8 | 0 | 0 | 0 | 0 | 0 | −30.01 | 0.63 | 0.92 |
| P10515 | DLAT | 13\|15\|13 | 41 | 13.67 | 13\|13\|13 | 0 | 0 | 0 | 0 | 0 | −29.78 | 1.05 | 0.91 |
| Q9Y606-2 | PUS1 | 4\|3\|2 | 9 | 3 | 0\|5\|3 | 0 | 0 | 0 | 0 | 0 | −9.12 | 1.12 | 0.84 |
| P98170 | XIAP | 18\|17\|23 | 58 | 19.33 | 19\|18\|15 | 0 | 0 | 0 | 0 | 0 | −39.25 | 1.12 | 0.91 |
| P08237 | PFKM | 20\|18\|17 | 55 | 18.33 | 18\|18\|17 | 0 | 0 | 0 | 0 | 0 | −40.42 | 1.04 | 0.91 |
| P18754 | RCC1 | 10\|9\|9 | 28 | 9.33 | 8\|8\|8 | 0 | 0 | 0 | 0 | 0 | −17.96 | 1.17 | 0.9 |
| P08238 | HSP90AB1 | 98\|90\|94 | 282 | 94 | 111\|111\| | 0 | 0 | 0 | 0 | 0 | −262.89 | 0.85 | 0.92 |
| | | | | | 109 | | | | | | | | |
| Q7L014 | DDX46 | 0\|2\|4 | 6 | 2 | 16\|14\|8 | 0 | 0 | 0 | 0 | 0 | −57.57 | 0.16 | 0.92 |
| Q6P1J9 | CDC73 | 3\|0\|2 | 5 | 1.67 | 2\|4\|4 | 0 | 0 | 0 | 0 | 0 | −16.29 | 0.5 | 0.92 |
| Q1KMD3 | HNRNPUL2 | 2\|0\|0 | 2 | 0.67 | 5\|5\|3 | 0 | 0 | 0 | 0 | 0 | −20.66 | 0.15 | 0.92 |
| O15226 | NKRF | 2\|0\|0 | 2 | 0.67 | 5\|3\|0 | 0 | 0 | 0 | 0 | 0 | −13.21 | 0.25 | 0.92 |
| Q9P2J5 | LARS | 12\|9\|9 | 30 | 10 | 17\|11\|19 | 0 | 0 | 0 | 0 | 0 | −46.36 | 0.64 | 0.92 |
| P28340 | POLD1 | 2\|5\|3 | 10 | 3.33 | 3\|4\|3 | 0 | 0 | 0 | 0 | 0 | −11.76 | 1 | 0.86 |
| P35232 | PHB | 3\|3\|2 | 8 | 2.67 | 5\|3\|2 | 0 | 0 | 0 | 0 | 0 | −11.76 | 0.8 | 0.92 |
| P30876 | POLR2B | 9\|5\|4 | 18 | 6 | 4\|6\|6 | 0 | 0 | 0 | 0 | 0 | −15.87 | 1.12 | 0.87 |
| P15924 | DSP | 42\|20\|24 | 86 | 28.67 | 28\|30\|26 | 0 | 0 | 0 | 0 | 0 | −73.52 | 1.02 | 0.92 |
| P52948-6 | NUP98 | 26\|27\|25 | 78 | 26 | 19\|22\|25 | 0 | 0 | 0 | 0 | 0 | −44.12 | 1.18 | 0.92 |
| P36542 | ATP5C1 | 7\|7\|5 | 19 | 6.33 | 7\|8\|12 | 0 | 0 | 0 | 0 | 0 | −28 | 0.7 | 0.92 |
| P40616-2 | ARL1 | 3\|3\|3 | 9 | 3 | 2\|5\|5 | 0 | 0 | 0 | 0 | 0 | −12.55 | 0.75 | 0.92 |
| Q9Y3F4 | STRAP | 6\|4\|8 | 18 | 6 | 6\|7\|6 | 0 | 0 | 0 | 0 | 0 | −19.6 | 0.95 | 0.9 |
| P17980 | PSMC3 | 9\|9\|8 | 26 | 8.67 | 8\|9\|6 | 0 | 0 | 0 | 0 | 0 | −18.23 | 1.13 | 0.9 |
| P17987 | TCP1 | 42\|32\|38 | 112 | 37.33 | 44\|41\|48 | 0 | 0 | 0 | 0 | 0 | −114.28 | 0.84 | 0.92 |
| P06239 | LCK | 3\|2\|3 | 8 | 2.67 | 3\|3\|2 | 0 | 0 | 0 | 0 | 0 | −9.34 | 1 | 0.86 |
| P63220 | RPS21 | 4\|6\|4 | 14 | 4.67 | 3\|4\|4 | 0 | 0 | 0 | 0 | 0 | −9.93 | 1.27 | 0.86 |
| O43143 | DHX15 | 14\|17\|19 | 50 | 16.67 | 14\|21\|19 | 0 | 0 | 0 | 0 | 0 | −46.27 | 0.93 | 0.91 |
| P67775 | PPP2CA | 3\|4\|6 | 13 | 4.33 | 5\|7\|6 | 0 | 0 | 0 | 0 | 0 | −20.15 | 0.72 | 0.92 |
| P28072 | PSMB6 | 0\|2\|2 | 4 | 1.33 | 3\|3\|2 | 0 | 0 | 0 | 0 | 0 | −13.44 | 0.5 | 0.92 |
| O75663 | TIPRL | 4\|2\|0 | 6 | 2 | 3\|0\|4 | 0 | 0.01 | 0 | 0.01 | 0 | −11.81 | 0.86 | 0.83 |
| Q8IYB8 | SUPV3L1 | 2\|0\|0 | 2 | 0.67 | 3\|0\|2 | 0 | 0 | 0 | 0 | 0 | −9.18 | 0.4 | 0.84 |
| P53597 | SUCLG1 | 0\|3\|2 | 5 | 1.67 | 2\|2\|3 | 0 | 0 | 0 | 0 | 0 | −11.98 | 0.71 | 0.85 |
| Q6PI48 | DARS2 | 6\|5\|6 | 17 | 5.67 | 7\|9\|7 | 0 | 0 | 0 | 0 | 0 | −22.9 | 0.74 | 0.92 |
| O43709 | BUD23 | 4\|4\|5 | 13 | 4.33 | 4\|5\|4 | 0 | 0 | 0 | 0 | 0 | −12.29 | 1 | 0.89 |
| P84103-2 | SRSF3 | 2\|0\|0 | 2 | 0.67 | 2\|0\|5 | 0 | 0 | 0 | 0 | 0 | −11.64 | 0.29 | 0.92 |
| P04406 | GAPDH | 36\|35\|36 | 107 | 35.67 | 37\|36\|30 | 0 | 0 | 0 | 0 | 0 | −73.05 | 1.04 | 0.92 |
| P42285 | SKIV2L2 | 4\|5\|6 | 15 | 5 | 8\|6\|5 | 0 | 0 | 0 | 0 | 0 | −19.6 | 0.79 | 0.92 |
| P62424 | RPL7A | 22\|16\|20 | 58 | 19.33 | 30\|24\|22 | 0 | 0 | 0 | 0 | 0 | −70.54 | 0.76 | 0.92 |
| P28331-3 | NDUFS1 | 5\|2\|4 | 11 | 3.67 | 4\|3\|3 | 0 | 0 | 0 | 0 | 0 | −11.76 | 1.1 | 0.86 |
| P31939-2 | ATIC | 7\|7\|6 | 20 | 6.67 | 7\|7\|4 | 0 | 0 | 0 | 0 | 0 | −15.26 | 1.11 | 0.9 |
| Q14152 | EIF3A | 0\|4\|4 | 8 | 2.67 | 12\|7\|4 | 0 | 0 | 0 | 0 | 0 | −35.13 | 0.35 | 0.92 |
| Q14151 | SAFB2 | 3\|0\|2 | 5 | 1.67 | 13\|10\|13 | 0 | 0 | 0 | 0 | 0 | −54.62 | 0.14 | 0.92 |
| P26038 | MSN | 2\|2\|3 | 7 | 2.33 | 2\|3\|2 | 0 | 0 | 0 | 0 | 0 | −8.15 | 1 | 0.85 |
| Q9Y5J1 | UTP18 | 2\|0\|2 | 4 | 1.33 | 3\|3\|3 | 0 | 0 | 0 | 0 | 0 | −14.8 | 0.44 | 0.92 |
| P19623 | SRM | 5\|4\|7 | 16 | 5.33 | 4\|3\|5 | 0 | 0 | 0 | 0 | 0 | −11.11 | 1.33 | 0.86 |
| P34897-3 | SHMT2 | 5\|9\|7 | 21 | 7 | 5\|7\|7 | 0 | 0 | 0 | 0 | 0 | −17.93 | 1.11 | 0.89 |
| P63241 | EIF5A | 9\|8\|8 | 25 | 8.33 | 8\|6\|6 | 0 | 0 | 0 | 0 | 0 | −14.71 | 1.25 | 0.89 |
| P63244 | RACK1 | 11\|10\|12 | 33 | 11 | 11\|14\|15 | 0 | 0 | 0 | 0 | 0 | −35.6 | 0.82 | 0.92 |
| Q13443 | ADAM9 | 0\|2\|3 | 5 | 1.67 | 5\|2\|3 | 0 | 0 | 0 | 0 | 0 | −16.29 | 0.5 | 0.92 |
| P62333 | PSMC6 | 6\|7\|6 | 19 | 6.33 | 10\|5\|9 | 0 | 0 | 0 | 0 | 0 | −22.42 | 0.79 | 0.92 |
| Q16576 | RBBP7 | 5\|4\|4 | 13 | 4.33 | 8\|7\|6 | 0 | 0 | 0 | 0 | 0 | −22.13 | 0.62 | 0.92 |
| Q9NZB2 | FAM120A | 4\|7\|5 | 16 | 5.33 | 8\|8\|5 | 0 | 0 | 0 | 0 | 0 | −22.13 | 0.76 | 0.92 |
| P30479 | HLA-B | 0\|2\|0 | 2 | 0.67 | 5\|3\|2 | 0 | 0 | 0 | 0 | 0 | −16.29 | 0.2 | 0.92 |
| O60566 | BUB1B | 6\|8\|12 | 26 | 8.67 | 8\|11\|9 | 0 | 0 | 0 | 0 | 0 | −27.45 | 0.93 | 0.9 |
| Q9UBU9 | NXF1 | 6\|6\|9 | 21 | 7 | 8\|6\|10 | 0 | 0 | 0 | 0 | 0 | −22.42 | 0.88 | 0.9 |
| Q13509 | TUBB3 | 59\|57\|64 | 180 | 60 | 62\|61\|59 | 0 | 0 | 0 | 0 | 0 | −134.02 | 0.99 | 0.92 |
| P61026 | RAB10 | 5\|4\|5 | 14 | 4.67 | 9\|9\|12 | 0 | 0 | 0 | 0 | 0 | −34.04 | 0.47 | 0.92 |
| P61020 | RAB5B | 3\|0\|6 | 9 | 3 | 6\|6\|7 | 0 | 0 | 0 | 0 | 0 | −29.46 | 0.47 | 0.92 |
| P59998 | ARPC4 | 2\|3\|3 | 8 | 2.67 | 2\|3\|2 | 0 | 0 | 0 | 0 | 0 | −8.15 | 1.14 | 0.85 |
| P12694 | BCKDHA | 2\|0\|2 | 4 | 1.33 | 3\|3\|2 | 0 | 0 | 0 | 0 | 0 | −13.44 | 0.5 | 0.92 |
| Q16719 | KYNU | 2\|4\|3 | 9 | 3 | 2\|2\|3 | 0 | 0.01 | 0 | 0.01 | 0 | −8.15 | 1.29 | 0.83 |
| Q7L576 | CYFIP1 | 2\|4\|3 | 9 | 3 | 3\|3\|3 | 0 | 0 | 0 | 0 | 0 | −10.47 | 1 | 0.86 |
| Q9UQE7 | SMC3 | 14\|9\|8 | 31 | 10.33 | 15\|12\|14 | 0 | 0 | 0 | 0 | 0 | −40.44 | 0.76 | 0.91 |
| P48634 | PRRC2A | 2\|3\|5 | 10 | 3.33 | 6\|4\|7 | 0 | 0 | 0 | 0 | 0 | −20.94 | 0.59 | 0.92 |
| Q96KR1 | ZFR | 8\|6\|7 | 21 | 7 | 17\|14\|12 | 0 | 0 | 0 | 0 | 0 | −47.18 | 0.49 | 0.92 |
| Q15286 | RAB35 | 4\|5\|4 | 13 | 4.33 | 5\|6\|4 | 0 | 0 | 0 | 0 | 0 | −14.62 | 0.87 | 0.92 |
| P61247 | RPS3A | 25\|14\|16 | 55 | 18.33 | 12\|12\|14 | 0 | 0 | 0 | 0 | 0 | −27.16 | 1.45 | 0.89 |
| Q13619 | CUL4A | 5\|3\|3 | 11 | 3.67 | 9\|10\|11 | 0 | 0 | 0 | 0 | 0 | −36.37 | 0.37 | 0.92 |
| P20339-2 | RAB5A | 4\|4\|6 | 14 | 4.67 | 4\|6\|7 | 0 | 0 | 0 | 0 | 0 | −17.11 | 0.82 | 0.9 |
| P15311 | EZR | 3\|2\|0 | 5 | 1.67 | 3\|5\|4 | 0 | 0 | 0 | 0 | 0 | −19.16 | 0.42 | 0.92 |
| P60866 | RPS20 | 5\|3\|3 | 11 | 3.67 | 6\|4\|3 | 0 | 0 | 0 | 0 | 0 | −13.81 | 0.85 | 0.89 |
| Q9BQC3-2 | DPH2 | 0\|0\|2 | 2 | 0.67 | 2\|0\|3 | 0 | 0 | 0 | 0 | 0 | −9.18 | 0.4 | 0.84 |
| P11908 | PRPS2 | 9\|7\|8 | 24 | 8 | 4\|7\|8 | 0 | 0 | 0 | 0 | 0 | −14.98 | 1.26 | 0.89 |
| P56537 | EIF6 | 9\|6\|6 | 21 | 7 | 6\|6\|6 | 0 | 0 | 0 | 0 | 0 | −15.26 | 1.17 | 0.89 |
| P10909-4 | CLU | 7\|14\|11 | 32 | 10.67 | 10\|8\|7 | 0 | 0 | 0 | 0 | 0 | −22.07 | 1.28 | 0.89 |
| O14776-2 | TCERG1 | 0\|2\|0 | 2 | 0.67 | 2\|3\|0 | 0 | 0 | 0 | 0 | 0 | −9.18 | 0.4 | 0.84 |
| Q6S8J3 | POTEE | 25\|19\|18 | 62 | 20.67 | 22\|24\|19 | 0 | 0 | 0 | 0 | 0 | −53.29 | 0.95 | 0.92 |
| O43390-4 | HNRNPR | 3\|4\|2 | 9 | 3 | 3\|3\|3 | 0 | 0 | 0 | 0 | 0 | −10.47 | 1 | 0.86 |
| P29353 | SHC1 | 7\|4\|6 | 17 | 5.67 | 7\|6\|7 | 0 | 0 | 0 | 0 | 0 | −20.88 | 0.85 | 0.9 |
| Q12904 | AIMP1 | 6\|3\|3 | 12 | 4 | 5\|3\|5 | 0 | 0 | 0 | 0 | 0 | −13.81 | 0.92 | 0.88 |
| P49419-2 | ALDH7A1 | 8\|3\|9 | 20 | 6.67 | 7\|3\|5 | 0 | 0 | 0 | 0 | 0 | −16.28 | 1.33 | 0.86 |
| Q9UJW0 | DCTN4 | 2\|0\|2 | 4 | 1.33 | 4\|4\|5 | 0 | 0 | 0 | 0 | 0 | −20.66 | 0.31 | 0.92 |
| Q9BXY0 | MAK16 | 0\|2\|2 | 4 | 1.33 | 2\|2\|2 | 0 | 0 | 0 | 0 | 0 | −10.49 | 0.67 | 0.92 |
| Q9P035 | HACD3 | 0\|0\|2 | 2 | 0.67 | 3\|3\|3 | 0 | 0 | 0 | 0 | 0 | −14.8 | 0.22 | 0.92 |
| Q00341-2 | HDLBP | 10\|7\|9 | 26 | 8.67 | 7\|5\|6 | 0 | 0 | 0 | 0 | 0 | −13.81 | 1.44 | 0.88 |
| P27816 | MAP4 | 17\|16\|18 | 51 | 17 | 36\|33\|26 | 0 | 0 | 0 | 0 | 0 | −95.41 | 0.54 | 0.92 |
| Q12874 | SF3A3 | 16\|16\|19 | 51 | 17 | 15\|13\|16 | 0 | 0 | 0 | 0 | 0 | −31.3 | 1.16 | 0.91 |
| Q13363-2 | CTBP1 | 3\|0\|0 | 3 | 1 | 4\|2\|3 | 0 | 0 | 0 | 0 | 0 | −14.8 | 0.33 | 0.92 |
| P51532-5 | SMARCA4 | 2\|0\|3 | 5 | 1.67 | 3\|4\|2 | 0 | 0 | 0 | 0 | 0 | −14.8 | 0.56 | 0.92 |
| Q93052 | LPP | 5\|7\|6 | 18 | 6 | 14\|8\|9 | 0 | 0 | 0 | 0 | 0 | −33.26 | 0.58 | 0.92 |
| P08754 | GNAI3 | 3\|4\|5 | 12 | 4 | 6\|6\|7 | 0 | 0 | 0 | 0 | 0 | −21.48 | 0.63 | 0.92 |
| P31327 | CPS1 | 112\|102\|101 | 315 | 105 | 131\|130\| | 0 | 0 | 0 | 0 | 0 | −313.92 | 0.81 | 0.92 |
| | | | | | 126 | | | | | | | | |
| P62937 | PPIA | 11\|12\|16 | 39 | 13 | 13\|16\|15 | 0 | 0 | 0 | 0 | 0 | −38.89 | 0.89 | 0.91 |
| P09622 | DLD | 13\|9\|8 | 30 | 10 | 10\|8\|9 | 0 | 0 | 0 | 0 | 0 | −22.92 | 1.11 | 0.9 |
| Q00325-2 | SLC25A3 | 12\|10\|13 | 35 | 11.67 | 14\|13\|13 | 0 | 0 | 0 | 0 | 0 | −35.6 | 0.87 | 0.92 |
| O43865 | AHCYL1 | 5\|8\|7 | 20 | 6.67 | 7\|8\|11 | 0 | 0 | 0 | 0 | 0 | −26.73 | 0.77 | 0.92 |
| P36776-2 | LONP1 | 3\|3\|5 | 11 | 3.67 | 6\|8\|11 | 0 | 0 | 0 | 0 | 0 | −29.52 | 0.44 | 0.92 |
| Q92905 | COPS5 | 4\|3\|4 | 11 | 3.67 | 4\|2\|3 | 0 | 0 | 0 | 0 | 0 | −9.04 | 1.22 | 0.86 |
| Q9Y314 | NOSIP | 8\|7\|6 | 21 | 7 | 6\|6\|5 | 0 | 0 | 0 | 0 | 0 | −14.08 | 1.24 | 0.89 |
| P46776 | RPL27A | 9\|9\|6 | 24 | 8 | 10\|5\|9 | 0 | 0 | 0 | 0 | 0 | −22.42 | 1 | 0.9 |
| P46778 | RPL21 | 23\|27\|27 | 77 | 25.67 | 29\|24\|21 | 0 | 0 | 0 | 0 | 0 | −56.41 | 1.04 | 0.92 |
| O60701-2 | UGDH | 7\|6\|8 | 21 | 7 | 6\|6\|7 | 0 | 0 | 0 | 0 | 0 | −16.44 | 1.11 | 0.9 |
| P43897 | TSFM | 4\|0\|3 | 7 | 2.33 | 4\|3\|7 | 0 | 0 | 0 | 0 | 0 | −22.13 | 0.5 | 0.92 |
| Q3ZCQ8 | TIMM50 | 0\|3\|3 | 6 | 2 | 4\|6\|5 | 0 | 0 | 0 | 0 | 0 | −23.55 | 0.4 | 0.92 |
| P34896-2 | SHMT1 | 2\|3\|2 | 7 | 2.33 | 3\|4\|4 | 0 | 0 | 0 | 0 | 0 | −13.04 | 0.64 | 0.92 |
| Q6P2Q9 | PRPF8 | 18\|13\|17 | 48 | 16 | 30\|35\|35 | 0 | 0 | 0 | 0 | 0 | −108.73 | 0.48 | 0.92 |
| O75874 | IDH1 | 14\|13\|18 | 45 | 15 | 19\|14\|16 | 0 | 0 | 0 | 0 | 0 | −41.76 | 0.92 | 0.91 |
| Q92878 | RAD50 | 3\|0\|2 | 5 | 1.67 | 11\|7\|5 | 0 | 0 | 0 | 0 | 0 | −35.38 | 0.22 | 0.92 |
| P06241 | FYN | 6\|4\|4 | 14 | 4.67 | 5\|5\|4 | 0 | 0 | 0 | 0 | 0 | −13.48 | 1 | 0.89 |
| Q5T4S7-3 | UBR4 | 6\|3\|5 | 14 | 4.67 | 5\|0\|4 | 0 | 0.01 | 0 | 0.01 | 0 | −8.72 | 1.56 | 0.81 |
| Q9Y3U8 | RPL36 | 3\|4\|3 | 10 | 3.33 | 2\|3\|4 | 0 | 0 | 0 | 0 | 0 | −9.04 | 1.11 | 0.86 |
| Q68CZ2 | TNS3 | 0\|4\|2 | 6 | 2 | 3\|4\|7 | 0 | 0 | 0 | 0 | 0 | −22.13 | 0.43 | 0.92 |
| P63010-3 | AP2B1 | 4\|4\|7 | 15 | 5 | 5\|4\|4 | 0 | 0 | 0 | 0 | 0 | −12.29 | 1.15 | 0.87 |
| Q5HY18 | RABL3 | 2\|0\|0 | 2 | 0.67 | 0\|6\|7 | 0 | 0 | 0 | 0 | 0 | −20.2 | 0.15 | 0.92 |
| P62753 | RPS6 | 13\|13\|19 | 45 | 15 | 19\|16\|20 | 0 | 0 | 0 | 0 | 0 | −49.22 | 0.82 | 0.91 |
| P62750 | RPL23A | 7\|8\|7 | 22 | 7.33 | 11\|8\|9 | 0 | 0 | 0 | 0 | 0 | −25.73 | 0.79 | 0.92 |
| P22392 | NME2 | 0\|2\|0 | 2 | 0.67 | 3\|2\|2 | 0 | 0 | 0 | 0 | 0 | −11.98 | 0.29 | 0.92 |
| P04075 | ALDOA | 10\|14\|13 | 37 | 12.33 | 13\|13\|16 | 0 | 0 | 0 | 0 | 0 | −38.08 | 0.88 | 0.92 |
| P09104-2 | ENO2 | 3\|2\|3 | 8 | 2.67 | 0\|3\|5 | 0 | 0 | 0 | 0 | 0 | −9.12 | 1 | 0.86 |
| Q6UB35 | MTHFD1L | 5\|3\|5 | 13 | 4.33 | 5\|7\|6 | 0 | 0 | 0 | 0 | 0 | −20.15 | 0.72 | 0.92 |
| P41250 | GARS | 21\|20\|24 | 65 | 21.67 | 24\|29\|33 | 0 | 0 | 0 | 0 | 0 | −76.05 | 0.76 | 0.92 |
| P41252 | IARS | 10\|5\|9 | 24 | 8 | 12\|11\|15 | 0 | 0 | 0 | 0 | 0 | −42.65 | 0.63 | 0.92 |
| Q9Y5Y2 | NUBP2 | 0\|2\|3 | 5 | 1.67 | 6\|0\|5 | 0 | 0 | 0 | 0 | 0 | −17.44 | 0.45 | 0.92 |
| Q14697-2 | GANAB | 13\|17\|14 | 44 | 14.67 | 17\|17\|16 | 0 | 0 | 0 | 0 | 0 | −42.99 | 0.88 | 0.91 |
| Q7KZI7-15 | MARK2 | 9\|4\|3 | 16 | 5.33 | 4\|3\|5 | 0 | 0.01 | 0 | 0.01 | 0 | −12.55 | 1.33 | 0.81 |
| Q13813-3 | SPTAN1 | 3\|3\|2 | 8 | 2.67 | 10\|11\|12 | 0 | 0 | 0 | 0 | 0 | −43.25 | 0.24 | 0.92 |
| Q9H4B7 | TUBB1 | 11\|12\|12 | 35 | 11.67 | 13\|11\|10 | 0 | 0 | 0 | 0 | 0 | −26.81 | 1.03 | 0.91 |
| P15121 | AKR1B1 | 2\|6\|6 | 14 | 4.67 | 4\|3\|3 | 0 | 0 | 0 | 0 | 0 | −11.76 | 1.4 | 0.83 |
| Q8TCU4-3 | ALMS1 | 0\|2\|2 | 4 | 1.33 | 2\|3\|2 | 0 | 0 | 0 | 0 | 0 | −11.98 | 0.57 | 0.92 |
| P46821 | MAP1B | 4\|5\|6 | 15 | 5 | 7\|4\|9 | 0 | 0 | 0 | 0 | 0 | −20.88 | 0.75 | 0.92 |
| P09543-2 | CNP | 6\|7\|8 | 21 | 7 | 5\|4\|6 | 0 | 0 | 0 | 0 | 0 | −11.74 | 1.4 | 0.87 |
| O60341 | KDM1A | 3\|2\|3 | 8 | 2.67 | 4\|4\|2 | 0 | 0 | 0 | 0 | 0 | −11.76 | 0.8 | 0.92 |
| Q6ZSR9 | Q6ZSR9 | 0\|3\|2 | 5 | 1.67 | 2\|2\|2 | 0 | 0 | 0 | 0 | 0 | −10.49 | 0.83 | 0.84 |
| Q9NV06 | DCAF13 | 2\|2\|2 | 6 | 2 | 4\|4\|0 | 0 | 0 | 0 | 0 | 0 | −9.18 | 0.75 | 0.92 |
| P19367-4 | HK1 | 3\|3\|4 | 10 | 3.33 | 2\|2\|3 | 0 | 0.01 | 0 | 0.01 | 0 | −6.68 | 1.43 | 0.83 |
| P61019 | RAB2A | 11\|8\|7 | 26 | 8.67 | 4\|7\|7 | 0 | 0 | 0 | 0 | 0 | −13.81 | 1.44 | 0.87 |
| Q6DKI1 | RPL7L1 | 2\|0\|2 | 4 | 1.33 | 3\|2\|3 | 0 | 0 | 0 | 0 | 0 | −13.44 | 0.5 | 0.92 |
| Q9NW82 | WDR70 | 4\|2\|2 | 8 | 2.67 | 4\|2\|3 | 0 | 0 | 0 | 0 | 0 | −10.47 | 0.89 | 0.86 |
| P07910-2 | HNRNPC | 4\|7\|7 | 18 | 6 | 12\|13\|8 | 0 | 0 | 0 | 0 | 0 | −38.11 | 0.55 | 0.92 |
| Q13618-2 | CUL3 | 4\|4\|4 | 12 | 4 | 6\|7\|4 | 0 | 0 | 0 | 0 | 0 | −17.11 | 0.71 | 0.92 |
| Q8IX12-2 | CCAR1 | 2\|0\|0 | 2 | 0.67 | 3\|0\|4 | 0 | 0 | 0 | 0 | 0 | −11.81 | 0.29 | 0.92 |
| Q9Y5K6 | CD2AP | 0\|3\|0 | 3 | 1 | 2\|3\|0 | 0 | 0.01 | 0 | 0.01 | 0 | −9.18 | 0.6 | 0.81 |
| O95433 | AHSA1 | 21\|22\|25 | 68 | 22.67 | 23\|19\|22 | 0 | 0 | 0 | 0 | 0 | −47.54 | 1.06 | 0.92 |
| Q66PJ3-7 | ARL6IP4 | 3\|3\|4 | 10 | 3.33 | 2\|2\|3 | 0 | 0.01 | 0 | 0.01 | 0 | −6.68 | 1.43 | 0.83 |
| Q9NR30 | DDX21 | 19\|19\|25 | 63 | 21 | 33\|30\|35 | 0 | 0 | 0 | 0 | 0 | −93.33 | 0.64 | 0.92 |
| P46087 | NOP2 | 2\|2\|0 | 4 | 1.33 | 6\|4\|3 | 0 | 0 | 0 | 0 | 0 | −20.66 | 0.31 | 0.92 |
| P49736 | MCM2 | 10\|12\|15 | 37 | 12.33 | 10\|12\|12 | 0 | 0 | 0 | 0 | 0 | −28.28 | 1.09 | 0.91 |
| Q96L92 | SNX27 | 2\|2\|2 | 6 | 2 | 4\|2\|4 | 0 | 0 | 0 | 0 | 0 | −11.76 | 0.6 | 0.92 |
| Q9Y2L1 | DIS3 | 5\|6\|7 | 18 | 6 | 14\|10\|8 | 0 | 0 | 0 | 0 | 0 | −34.59 | 0.56 | 0.92 |
| Q9H0H5 | RACGAP1 | 2\|0\|0 | 2 | 0.67 | 2\|0\|3 | 0 | 0 | 0 | 0 | 0 | −9.18 | 0.4 | 0.84 |
| Q15436 | SEC23A | 3\|6\|6 | 15 | 5 | 4\|4\|6 | 0 | 0 | 0 | 0 | 0 | −15.06 | 1.07 | 0.88 |
| P09960 | LTA4H | 0\|0\|2 | 2 | 0.67 | 3\|2\|4 | 0 | 0 | 0 | 0 | 0 | −14.8 | 0.22 | 0.92 |
| P30084 | ECHS1 | 2\|0\|0 | 2 | 0.67 | 2\|2\|2 | 0 | 0 | 0 | 0 | 0 | −10.49 | 0.33 | 0.92 |
| O15027 | SEC16A | 13\|10\|14 | 37 | 12.33 | 20\|19\|22 | 0 | 0 | 0 | 0 | 0 | −62.71 | 0.61 | 0.92 |
| Q0VDF9 | HSPA14 | 2\|0\|3 | 5 | 1.67 | 3\|5\|3 | 0 | 0 | 0 | 0 | 0 | −17.76 | 0.45 | 0.92 |
| O75746-2 | SLC25A12 | 3\|6\|3 | 12 | 4 | 6\|3\|5 | 0 | 0 | 0 | 0 | 0 | −15.06 | 0.86 | 0.89 |
| Q9NQW7 | XPNPEP1 | 2\|0\|0 | 2 | 0.67 | 4\|4\|0 | 0 | 0 | 0 | 0 | 0 | −13.27 | 0.25 | 0.92 |
| Q6P587 | FAHD1 | 3\|2\|3 | 8 | 2.67 | 3\|2\|3 | 0 | 0 | 0 | 0 | 0 | −9.34 | 1 | 0.86 |
| P23921 | RRM1 | 17\|12\|13 | 42 | 14 | 14\|16\|15 | 0 | 0 | 0 | 0 | 0 | −38.46 | 0.93 | 0.91 |
| O00299 | CLIC1 | 8\|9\|10 | 27 | 9 | 9\|7\|7 | 0 | 0 | 0 | 0 | 0 | −18.23 | 1.17 | 0.9 |
| O94925-3 | GLS | 2\|0\|0 | 2 | 0.67 | 3\|3\|6 | 0 | 0 | 0 | 0 | 0 | −19.16 | 0.17 | 0.92 |
| P31689 | DNAJA1 | 5\|8\|5 | 18 | 6 | 5\|4\|5 | 0 | 0 | 0 | 0 | 0 | −12.01 | 1.29 | 0.87 |
| P11802 | CDK4 | 3\|0\|3 | 6 | 2 | 3\|3\|3 | 0 | 0 | 0 | 0 | 0 | −14.8 | 0.67 | 0.92 |
| Q15046 | KARS | 6\|4\|0 | 10 | 3.33 | 9\|6\|8 | 0 | 0 | 0 | 0 | 0 | −35.37 | 0.43 | 0.92 |
| Q12789-3 | GTF3C1 | 0\|0\|3 | 3 | 1 | 3\|3\|2 | 0 | 0 | 0 | 0 | 0 | −13.44 | 0.38 | 0.87 |
| P49915 | GMPS | 15\|13\|16 | 44 | 14.67 | 13\|15\|18 | 0 | 0 | 0 | 0 | 0 | −38.1 | 0.96 | 0.91 |
| P02533 | KRT14 | 51\|24\|16 | 91 | 30.33 | 25\|27\|26 | 0 | 0 | 0 | 0 | 0 | −73.11 | 1.17 | 0.91 |
| Q8IWS0-5 | PHF6 | 2\|0\|7 | 9 | 3 | 4\|7\|5 | 0 | 0 | 0 | 0 | 0 | −25.05 | 0.56 | 0.89 |
| P04264 | KRT1 | 59\|46\|23 | 128 | 42.67 | 65\|62\|40 | 0 | 0 | 0 | 0 | 0 | −176.54 | 0.77 | 0.92 |
| Q9UJU6 | DBNL | 5\|4\|6 | 15 | 5 | 4\|4\|5 | 0 | 0 | 0 | 0 | 0 | −12.29 | 1.15 | 0.88 |
| Q01780 | EXOSC10 | 8\|7\|5 | 20 | 6.67 | 7\|9\|14 | 0 | 0 | 0 | 0 | 0 | −31.9 | 0.67 | 0.92 |
| O60502 | MGEA5 | 0\|7\|3 | 10 | 3.33 | 6\|2\|7 | 0 | 0 | 0 | 0 | 0 | −23.49 | 0.67 | 0.89 |
| Q99426 | TBCB | 9\|5\|9 | 23 | 7.67 | 9\|8\|7 | 0 | 0 | 0 | 0 | 0 | −24.14 | 0.96 | 0.9 |
| P05198 | EIF2S1 | 10\|13\|12 | 35 | 11.67 | 18\|14\|15 | 0 | 0 | 0 | 0 | 0 | −44.43 | 0.74 | 0.92 |
| P07437 | TUBB | 100\|104\|105 | 309 | 103 | 115\|113\| | 0 | 0 | 0 | 0 | 0 | −261.52 | 0.9 | 0.92 |
| | | | | | 115 | | | | | | | | |
| Q9Y490 | TLN1 | 5\|0\|6 | 11 | 3.67 | 6\|6\|5 | 0 | 0 | 0 | 0 | 0 | −26.53 | 0.65 | 0.9 |
| P78347-2 | GTF21 | 2\|2\|4 | 8 | 2.67 | 5\|12\|8 | 0 | 0 | 0 | 0 | 0 | −31.87 | 0.32 | 0.92 |
| Q01650 | SLC7A5 | 5\|5\|5 | 15 | 5 | 854 | 0 | 0 | 0 | 0 | 0 | −15.55 | 0.88 | 0.92 |
| P43243 | MATR3 | 2\|5\|4 | 11 | 3.67 | 10\|7\|10 | 0 | 0 | 0 | 0 | 0 | −34.75 | 0.41 | 0.92 |
| P23381 | WARS | 17\|13\|15 | 45 | 15 | 19\|18\|18 | 0 | 0 | 0 | 0 | 0 | −49.22 | 0.82 | 0.92 |
| P49005 | POLD2 | 7\|4\|5 | 16 | 5.33 | 5\|4\|2 | 0 | 0 | 0 | 0 | 0 | −9.93 | 1.45 | 0.84 |
| Q9NVI7-2 | ATAD3A | 4\|6\|5 | 15 | 5 | 7\|7\|8 | 0 | 0 | 0 | 0 | 0 | −23.44 | 0.68 | 0.92 |
| P00374-2 | DHFR | 3\|3\|0 | 6 | 2 | 2\|3\|3 | 0 | 0 | 0 | 0 | 0 | −13.44 | 0.75 | 0.86 |
| P27708 | CAD | 11\|14\|16 | 41 | 13.67 | 18\|22\|17 | 0 | 0 | 0 | 0 | 0 | −55.44 | 0.72 | 0.92 |
| P31946-2 | YWHAB | 9\|9\|11 | 29 | 9.67 | 8\|13\|14 | 0 | 0 | 0 | 0 | 0 | −31.08 | 0.83 | 0.92 |
| Q9Y4L1 | HYOU1 | 4\|3\|7 | 14 | 4.67 | 6\|6\|9 | 0 | 0 | 0 | 0 | 0 | −24.11 | 0.67 | 0.92 |
| Q9NQW6-2 | ANLN | 3\|3\|7 | 13 | 4.33 | 5\|4\|3 | 0 | 0 | 0 | 0 | 0 | −12.55 | 1.08 | 0.86 |
| Q13283 | G3BP1 | 2\|0\|3 | 5 | 1.67 | 2\|3\|2 | 0 | 0 | 0 | 0 | 0 | −11.98 | 0.71 | 0.85 |
| O75600 | GCAT | 2\|0\|0 | 2 | 0.67 | 0\|2\|2 | 0 | 0.01 | 0 | 0.01 | 0 | −7.85 | 0.5 | 0.82 |
| P23258 | TUBG1 | 7\|3\|3 | 13 | 4.33 | 6\|4\|5 | 0 | 0 | 0 | 0 | 0 | −16.28 | 0.87 | 0.89 |
| Q14103-3 | HNRNPD | 12\|17\|18 | 47 | 15.67 | 24\|18\|20 | 0 | 0 | 0 | 0 | 0 | −60.02 | 0.76 | 0.92 |
| P20042 | EIF2S2 | 11\|14\|12 | 37 | 12.33 | 15\|14\|10 | 0 | 0 | 0 | 0 | 0 | −32.74 | 0.95 | 0.91 |
| Q9Y281-3 | CFL2 | 8\|7\|9 | 24 | 8 | 5\|6\|8 | 0 | 0 | 0 | 0 | 0 | −14.98 | 1.26 | 0.89 |
| Q9GZZ1 | NAA50 | 5\|0\|4 | 9 | 3 | 4\|4\|5 | 0 | 0 | 0 | 0 | 0 | −20.66 | 0.69 | 0.89 |
| O96008 | TOMM40 | 0\|2\|2 | 4 | 1.33 | 2\|6\|0 | 0 | 0 | 0 | 0 | 0 | −13.06 | 0.5 | 0.92 |
| Q99707 | MTR | 4\|5\|6 | 15 | 5 | 5\|6\|4 | 0 | 0 | 0 | 0 | 0 | −14.62 | 1 | 0.89 |
| O94966-2 | USP19 | 0\|0\|2 | 2 | 0.67 | 4\|2\|0 | 0 | 0 | 0 | 0 | 0 | −10.24 | 0.33 | 0.92 |
| P25705 | ATP5A1 | 35\|27\|32 | 94 | 31.33 | 35\|37\|41 | 0 | 0 | 0 | 0 | 0 | −97.82 | 0.83 | 0.92 |
| O43615 | TIMM44 | 6\|4\|5 | 15 | 5 | 7\|6\|6 | 0 | 0 | 0 | 0 | 0 | −19.6 | 0.79 | 0.92 |
| Q8WWM7-6 | ATXN2L | 6\|6\|8 | 20 | 6.67 | 6\|5\|8 | 0 | 0 | 0 | 0 | 0 | −16.44 | 1.05 | 0.9 |
| P61313 | RPL15 | 11\|8\|9 | 28 | 9.33 | 13\|10\|10 | 0 | 0 | 0 | 0 | 0 | −30.24 | 0.85 | 0.92 |
| Q9HCM7 | FBRSL1 | 3\|4\|5 | 12 | 4 | 2\|4\|4 | 0 | 0 | 0 | 0 | 0 | −10.22 | 1.2 | 0.86 |
| P04908 | HIST1H2AE; | 0\|3\|4 | 7 | 2.33 | 8\|6\|8 | 0 | 0 | 0 | 0 | 0 | −33.89 | 0.32 | 0.92 |
| | HIST1H2AB | | | | | | | | | | | | |
| Q13263 | TRIM28 | 4\|3\|4 | 11 | 3.67 | 8\|8\|12 | 0 | 0 | 0 | 0 | 0 | −33.63 | 0.39 | 0.92 |
| O75131 | CPNE3 | 5\|4\|6 | 15 | 5 | 9\|5\|4 | 0 | 0 | 0 | 0 | 0 | −18.34 | 0.83 | 0.92 |
| P61006 | RAB8A | 5\|7\|6 | 18 | 6 | 8\|7\|7 | 0 | 0 | 0 | 0 | 0 | −21.63 | 0.82 | 0.92 |
| P08559-3 | PDHA1 | 14\|8\|8 | 30 | 10 | 11\|11\|11 | 0 | 0 | 0 | 0 | 0 | −30.24 | 0.91 | 0.91 |
| P21399 | ACO1 | 5\|3\|4 | 12 | 4 | 3\|6\|4 | 0 | 0 | 0 | 0 | 0 | −13.81 | 0.92 | 0.89 |
| P22626 | HNRNPA2B1 | 0\|5\|3 | 8 | 2.67 | 2\|5\|5 | 0 | 0 | 0 | 0 | 0 | −19.16 | 0.67 | 0.88 |
| Q15738 | NSDHL | 2\|5\|0 | 7 | 2.33 | 2\|3\|5 | 0 | 0 | 0 | 0 | 0 | −16.29 | 0.7 | 0.86 |
| Q15029-2 | EFTUD2 | 10\|9\|12 | 31 | 10.33 | 22\|19\|22 | 0 | 0 | 0 | 0 | 0 | −67.54 | 0.49 | 0.92 |
| Q7L2E3-3 | DHX30 | 7\|7\|9 | 23 | 7.67 | 13\|8\|10 | 0 | 0 | 0 | 0 | 0 | −29.47 | 0.74 | 0.92 |
| P54136 | RARS | 11\|11\|10 | 32 | 10.67 | 13\|13\|13 | 0 | 0 | 0 | 0 | 0 | −34.35 | 0.82 | 0.92 |
| Q02952-3 | AKAP12 | 2\|0\|5 | 7 | 2.33 | 4\|4\|6 | 0 | 0 | 0 | 0 | 0 | −22.13 | 0.5 | 0.89 |
| Q96PV6 | LENG8 | 2\|0\|2 | 4 | 1.33 | 2\|2\|2 | 0 | 0 | 0 | 0 | 0 | −10.49 | 0.67 | 0.92 |
| Q06830 | PRDX1 | 10\|4\|10 | 24 | 8 | 6\|5\|6 | 0 | 0 | 0 | 0 | 0 | −17.11 | 1.41 | 0.87 |
| O00116 | AGPS | 10\|6\|8 | 24 | 8 | 6\|5\|7 | 0 | 0 | 0 | 0 | 0 | −15.26 | 1.33 | 0.88 |
| Q03519-2 | TAP2 | 0\|3\|3 | 6 | 2 | 4\|2\|0 | 0 | 0.01 | 0 | 0.01 | 0 | −10.24 | 1 | 0.81 |
| P30520 | ADSS | 6\|8\|5 | 19 | 6.33 | 8\|6\|8 | 0 | 0 | 0 | 0 | 0 | −21.63 | 0.86 | 0.9 |
| Q15428 | SF3A2 | 6\|7\|6 | 19 | 6.33 | 3\|5\|10 | 0 | 0 | 0 | 0 | 0 | −14.98 | 1.06 | 0.9 |
| P10155-3 | TROVE2 | 2\|2\|2 | 6 | 2 | 2\|3\|2 | 0 | 0 | 0 | 0 | 0 | −8.15 | 0.86 | 0.92 |
| P49588 | AARS | 7\|6\|6 | 19 | 6.33 | 11\|10\|11 | 0 | 0 | 0 | 0 | 0 | −32.59 | 0.59 | 0.92 |
| Q9HCC0 | MCCC2 | 26\|19\|24 | 69 | 23 | 29\|26\|25 | 0 | 0 | 0 | 0 | 0 | −70.23 | 0.86 | 0.92 |
| P30419 | NMT1 | 3\|3\|4 | 10 | 3.33 | 5\|2\|4 | 0 | 0 | 0 | 0 | 0 | −11.41 | 0.91 | 0.88 |
| Q14498-2 | RBM39 | 7\|7\|6 | 20 | 6.67 | 7\|4\|9 | 0 | 0 | 0 | 0 | 0 | −17.62 | 1 | 0.9 |
| P60842 | EIF4A1 | 63\|51\|62 | 176 | 58.67 | 64\|70\|69 | 0 | 0 | 0 | 0 | 0 | −169.3 | 0.87 | 0.92 |
| Q96151-2 | RCC1L | 0\|2\|0 | 2 | 0.67 | 0\|2\|2 | 0 | 0.01 | 0 | 0.01 | 0 | −7.85 | 0.5 | 0.82 |
| P47755 | CAPZA2 | 5\|7\|5 | 17 | 5.67 | 4\|5\|6 | 0 | 0 | 0 | 0 | 0 | −13.18 | 1.13 | 0.89 |
| Q8TDD1 | DDX54 | 2\|2\|3 | 7 | 2.33 | 2\|5\|3 | 0 | 0 | 0 | 0 | 0 | −11.76 | 0.7 | 0.92 |
| P48507 | GCLM | 4\|4\|5 | 13 | 4.33 | 4\|2\|3 | 0 | 0 | 0 | 0 | 0 | −7.59 | 1.44 | 0.84 |
| P53985 | SLC16A1 | 6\|5\|4 | 15 | 5 | 5\|4\|5 | 0 | 0 | 0 | 0 | 0 | −13.48 | 1.07 | 0.89 |
| Q9BRX2 | PELO | 8\|5\|3 | 16 | 5.33 | 6\|5\|7 | 0 | 0 | 0 | 0 | 0 | −20.15 | 0.89 | 0.89 |
| Q96D46 | NMD3 | 5\|4\|5 | 14 | 4.67 | 6\|6\|6 | 0 | 0 | 0 | 0 | 0 | −18.31 | 0.78 | 0.92 |
| P08195-2 | SLC3A2 | 18\|18\|17 | 53 | 17.67 | 19\|23\|21 | 0 | 0 | 0 | 0 | 0 | −52.44 | 0.84 | 0.92 |
| P51659 | HSD17B4 | 8\|7\|7 | 22 | 7.33 | 7\|7\|8 | 0 | 0 | 0 | 0 | 0 | −18.51 | 1 | 0.9 |
| Q13586 | STIM1 | 0\|2\|0 | 2 | 0.67 | 3\|3\|0 | 0 | 0 | 0 | 0 | 0 | −10.39 | 0.33 | 0.92 |
| P56192 | MARS | 6\|4\|8 | 18 | 6 | 7\|8\|15 | 0 | 0 | 0 | 0 | 0 | −33.82 | 0.6 | 0.92 |
| P35573-2 | AGL | 0\|0\|2 | 2 | 0.67 | 2\|2\|0 | 0 | 0.01 | 0 | 0.01 | 0 | −7.85 | 0.5 | 0.82 |
| P20700 | LMNB1 | 20\|18\|16 | 54 | 18 | 17\|21\|19 | 0 | 0 | 0 | 0 | 0 | −46.71 | 0.95 | 0.92 |
| P55884 | EIF3B | 0\|2\|4 | 6 | 2 | 2\|3\|2 | 0 | 0.01 | 0 | 0.01 | 0 | −11.98 | 0.86 | 0.83 |
| P43246 | MSH2 | 8\|9\|9 | 26 | 8.67 | 10\|11\|17 | 0 | 0 | 0 | 0 | 0 | −36.62 | 0.68 | 0.92 |
| P07737 | PFN1 | 51\|49\|54 | 154 | 51.33 | 48\|47\|45 | 0 | 0 | 0 | 0 | 0 | −96.23 | 1.1 | 0.92 |
| P52294 | KPNA1 | 0\|0\|4 | 4 | 1.33 | 3\|2\|4 | 0 | 0 | 0 | 0 | 0 | −14.8 | 0.44 | 0.86 |
| P52292 | KPNA2 | 5\|4\|8 | 17 | 5.67 | 4\|0\|7 | 0 | 0.01 | 0 | 0.01 | 0 | −9.41 | 1.55 | 0.81 |
| P00966 | ASS1 | 19\|20\|27 | 66 | 22 | 30\|41\|39 | 0 | 0 | 0 | 0 | 0 | −109.1 | 0.6 | 0.92 |
| P62910 | RPL32 | 6\|6\|7 | 19 | 6.33 | 7\|5\|6 | 0 | 0 | 0 | 0 | 0 | −15.26 | 1.06 | 0.9 |
| P14618-2 | PKM | 73\|61\|64 | 198 | 66 | 72\|62\|72 | 0 | 0 | 0 | 0 | 0 | −156.69 | 0.96 | 0.92 |
| Q03518 | TAP1 | 4\|2\|0 | 6 | 2 | 3\|4\|3 | 0 | 0 | 0 | 0 | 0 | −16.29 | 0.6 | 0.88 |
| P62917 | RPL8 | 11\|11\|6 | 28 | 9.33 | 10\|6\|9 | 0 | 0 | 0 | 0 | 0 | −23.68 | 1.12 | 0.9 |
| O00425 | IGF2BP3 | 6\|6\|8 | 20 | 6.67 | 11\|10\|10 | 0 | 0 | 0 | 0 | 0 | −31.29 | 0.65 | 0.92 |
| Q9H832 | UBE2Z | 4\|0\|3 | 7 | 2.33 | 4\|2\|2 | 0 | 0 | 0 | 0 | 0 | −13.44 | 0.88 | 0.85 |
| Q15382 | RHEB | 5\|4\|3 | 12 | 4 | 6\|4\|3 | 0 | 0 | 0 | 0 | 0 | −13.81 | 0.92 | 0.89 |
| Q10471 | GALNT2 | 4\|2\|3 | 9 | 3 | 5\|3\|4 | 0 | 0 | 0 | 0 | 0 | −14.26 | 0.75 | 0.92 |
| Q00796 | SORD | 0\|3\|4 | 7 | 2.33 | 3\|4\|3 | 0 | 0 | 0 | 0 | 0 | −16.29 | 0.7 | 0.88 |
| Q9H0U4 | RAB1B | 13\|15\|15 | 43 | 14.33 | 16\|19\|18 | 0 | 0 | 0 | 0 | 0 | −46.72 | 0.81 | 0.92 |
| O00743-2 | PPP6C | 4\|3\|2 | 9 | 3 | 2\|3\|3 | 0 | 0 | 0 | 0 | 0 | −9.34 | 1.12 | 0.85 |
| Q9NTJ3 | SMC4 | 10\|11\|11 | 32 | 10.67 | 10\|12\|7 | 0 | 0 | 0 | 0 | 0 | −22.38 | 1.1 | 0.91 |
| O43683-2 | BUB1 | 2\|2\|0 | 4 | 1.33 | 3\|3\|4 | 0 | 0 | 0 | 0 | 0 | −16.29 | 0.4 | 0.92 |
| P35658-2 | NUP214 | 17\|15\|24 | 56 | 18.67 | 22\|26\|25 | 0 | 0 | 0 | 0 | 0 | −68.55 | 0.77 | 0.92 |
| P35268 | RPL22 | 9\|6\|6 | 21 | 7 | 7\|7\|7 | 0 | 0 | 0 | 0 | 0 | −18.77 | 1 | 0.9 |
| Q71U36-2 | TUBA1A | 81\|62\|75 | 218 | 72.67 | 77\|72\|76 | 0 | 0 | 0 | 0 | 0 | −178.23 | 0.97 | 0.92 |
| Q10713 | PMPCA | 3\|4\|3 | 10 | 3.33 | 3\|5\|4 | 0 | 0 | 0 | 0 | 0 | −12.55 | 0.83 | 0.92 |
| P00367 | GLUD1 | 2\|3\|3 | 8 | 2.67 | 2\|3\|3 | 0 | 0 | 0 | 0 | 0 | −9.34 | 1 | 0.86 |
| Q9UKN8 | GTF3C4 | 5\|0\|3 | 8 | 2.67 | 4\|5\|7 | 0 | 0 | 0 | 0 | 0 | −25.05 | 0.5 | 0.92 |
| Q3KQU3-4 | MAP7D1 | 11\|7\|6 | 24 | 8 | 8\|7\|9 | 0 | 0 | 0 | 0 | 0 | −22.42 | 1 | 0.9 |
| Q99623 | PHB2 | 4\|3\|7 | 14 | 4.67 | 8\|6\|9 | 0 | 0 | 0 | 0 | 0 | −26.82 | 0.61 | 0.92 |
| Q8N884 | MB21D1 | 0\|2\|0 | 2 | 0.67 | 0\|2\|2 | 0 | 0.01 | 0 | 0.01 | 0 | −7.85 | 0.5 | 0.82 |
| P11940-2 | PABPC1 | 4\|3\|2 | 9 | 3 | 4\|6\|5 | 0 | 0 | 0 | 0 | 0 | −18.21 | 0.6 | 0.92 |
| P28288 | ABCD3 | 4\|2\|3 | 9 | 3 | 4\|6\|6 | 0 | 0 | 0 | 0 | 0 | −19.58 | 0.56 | 0.92 |
| P23246 | SFPQ | 25\|29\|23 | 77 | 25.67 | 26\|23\|27 | 0 | 0 | 0 | 0 | 0 | −58.8 | 1.01 | 0.92 |
| Q7KZF4 | SND1 | 30\|26\|34 | 90 | 30 | 33\|32\|37 | 0 | 0 | 0 | 0 | 0 | −85.76 | 0.88 | 0.92 |
| P24752 | ACAT1 | 8\|13\|10 | 31 | 10.33 | 14\|12\|10 | 0 | 0 | 0 | 0 | 0 | −34.01 | 0.86 | 0.91 |
| Q99714 | HSD17B10 | 2\|2\|0 | 4 | 1.33 | 2\|2\|2 | 0 | 0 | 0 | 0 | 0 | −10.49 | 0.67 | 0.92 |
| Q9H307 | PNN | 2\|0\|3 | 5 | 1.67 | 3\|6\|3 | 0 | 0 | 0 | 0 | 0 | −19.16 | 0.42 | 0.92 |
| Q14157-1 | UBAP2L | 9\|11\|12 | 32 | 10.67 | 17\|6\|14 | 0 | 0 | 0 | 0 | 0 | −33.18 | 0.86 | 0.92 |
| P52701 | MSH6 | 6\|4\|4 | 14 | 4.67 | 7\|4\|4 | 0 | 0 | 0 | 0 | 0 | −14.62 | 0.93 | 0.89 |
| P11310 | ACADM | 3\|0\|3 | 6 | 2 | 4\|3\|0 | 0 | 0 | 0 | 0 | 0 | −11.81 | 0.86 | 0.84 |
| Q5T9A4 | ATAD3B | 5\|6\|5 | 16 | 5.33 | 5\|5\|5 | 0 | 0 | 0 | 0 | 0 | −13.18 | 1.07 | 0.89 |
| P43686-2 | PSMC4 | 4\|5\|7 | 16 | 5.33 | 5\|7\|6 | 0 | 0 | 0 | 0 | 0 | −18.31 | 0.89 | 0.9 |
| Q14166 | TTLL12 | 4\|4\|7 | 15 | 5 | 8\|5\|9 | 0 | 0 | 0 | 0 | 0 | −23.44 | 0.68 | 0.92 |
| P10809 | HSPD1 | 12\|22\|22 | 56 | 18.67 | 24\|19\|27 | 0 | 0 | 0 | 0 | 0 | −70.52 | 0.8 | 0.92 |
| Q7Z6E9-2 | RBBP6 | 4\|4\|7 | 15 | 5 | 10\|10\|12 | 0 | 0 | 0 | 0 | 0 | −36.77 | 0.47 | 0.92 |
| Q16836 | HADH | 5\|4\|5 | 14 | 4.67 | 6\|6\|3 | 0 | 0 | 0 | 0 | 0 | −14.62 | 0.93 | 0.92 |
| Q15043-2 | SLC39A14 | 0\|0\|2 | 2 | 0.67 | 2\|2\|0 | 0 | 0.01 | 0 | 0.01 | 0 | −7.85 | 0.5 | 0.82 |
| Q9UJU6-2 | DBNL | 5\|4\|5 | 14 | 4.67 | 4\|4\|5 | 0 | 0 | 0 | 0 | 0 | −12.29 | 1.08 | 0.89 |
| Q16543 | CDC37 | 4\|3\|6 | 13 | 4.33 | 5\|6\|4 | 0 | 0 | 0 | 0 | 0 | −16.28 | 0.87 | 0.89 |
| Q13257 | MAD2L1 | 3\|4\|4 | 11 | 3.67 | 3\|2\|4 | 0 | 0 | 0 | 0 | 0 | −9.04 | 1.22 | 0.86 |
| P49368 | CCT3 | 29\|28\|23 | 80 | 26.67 | 36\|36\|41 | 0 | 0 | 0 | 0 | 0 | −105.12 | 0.71 | 0.92 |
| P32119 | PRDX2 | 6\|7\|4 | 17 | 5.67 | 6\|5\|3 | 0 | 0 | 0 | 0 | 0 | −13.48 | 1.21 | 0.88 |
| Q07866-8 | KLC1 | 5\|0\|4 | 9 | 3 | 3\|4\|2 | 0 | 0 | 0 | 0 | 0 | −14.8 | 1 | 0.85 |
| P19013 | KRT4 | 5\|3\|0 | 8 | 2.67 | 4\|2\|3 | 0 | 0 | 0 | 0 | 0 | −14.8 | 0.89 | 0.85 |
| Q8IZP0-2 | ABI1 | 9\|11\|12 | 32 | 10.67 | 10\|10\|8 | 0 | 0 | 0 | 0 | 0 | −22.66 | 1.14 | 0.9 |
| P26196 | DDX6 | 5\|6\|7 | 18 | 6 | 4\|5\|4 | 0 | 0 | 0 | 0 | 0 | −10.83 | 1.38 | 0.87 |
| Q9BUQ8 | DDX23 | 2\|3\|3 | 8 | 2.67 | 8\|2\|7 | 0 | 0 | 0 | 0 | 0 | −20.77 | 0.47 | 0.92 |
| Q9BWE0 | REPIN1 | 0\|5\|3 | 8 | 2.67 | 5\|3\|4 | 0 | 0 | 0 | 0 | 0 | −19.16 | 0.67 | 0.88 |
| Q9BWD1 | ACAT2 | 10\|7\|7 | 24 | 8 | 13\|10\|11 | 0 | 0 | 0 | 0 | 0 | −33.29 | 0.71 | 0.92 |
| Q9Y5M8 | SRPRB | 3\|4\|3 | 10 | 3.33 | 6\|5\|4 | 0 | 0 | 0 | 0 | 0 | −16.28 | 0.67 | 0.92 |
| P33992 | MCM5 | 15\|20\|15 | 50 | 16.67 | 18\|15\|20 | 0 | 0 | 0 | 0 | 0 | −43.45 | 0.94 | 0.91 |
| P33993 | MCM7 | 30\|27\|29 | 86 | 28.67 | 29\|32\|31 | 0 | 0 | 0 | 0 | 0 | −71.88 | 0.93 | 0.92 |
| P33991 | MCM4 | 11\|18\|18 | 47 | 15.67 | 19\|21\|12 | 0 | 0 | 0 | 0 | 0 | −48.97 | 0.9 | 0.91 |
| P50914 | RPL14 | 3\|3\|3 | 9 | 3 | 3\|5\|5 | 0 | 0 | 0 | 0 | 0 | −13.81 | 0.69 | 0.92 |
| P49755 | TMED10 | 3\|3\|4 | 10 | 3.33 | 3\|4\|6 | 0 | 0 | 0 | 0 | 0 | −13.81 | 0.77 | 0.92 |
| P49756 | RBM25 | 0\|4\|3 | 7 | 2.33 | 4\|5\|4 | 0 | 0 | 0 | 0 | 0 | −20.66 | 0.54 | 0.92 |
| O75534-2 | CSDE1 | 10\|8\|15 | 33 | 11 | 12\|11\|9 | 0 | 0 | 0 | 0 | 0 | −29.02 | 1.03 | 0.91 |
| P49591 | SARS | 7\|6\|5 | 18 | 6 | 5\|4\|6 | 0 | 0 | 0 | 0 | 0 | −13.18 | 1.2 | 0.89 |
| Q86V48-2 | LUZP1 | 0\|4\|4 | 8 | 2.67 | 4\|4\|7 | 0 | 0 | 0 | 0 | 0 | −23.55 | 0.53 | 0.92 |
| P61586 | RHOA | 0\|6\|4 | 10 | 3.33 | 4\|4\|5 | 0 | 0 | 0 | 0 | 0 | −20.66 | 0.77 | 0.88 |
| Q14938-6 | NFIX | 0\|0\|2 | 2 | 0.67 | 2\|0\|2 | 0 | 0.01 | 0 | 0.01 | 0 | −7.85 | 0.5 | 0.82 |
| Q9H0D6 | XRN2 | 5\|7\|7 | 19 | 6.33 | 5\|7\|5 | 0 | 0 | 0 | 0 | 0 | −15.55 | 1.12 | 0.89 |
| O43172-2 | PRPF4 | 8\|4\|6 | 18 | 6 | 9\|8\|10 | 0 | 0 | 0 | 0 | 0 | −30.01 | 0.67 | 0.92 |
| Q7Z417 | NUFIP2 | 3\|3\|3 | 9 | 3 | 4\|8\|5 | 0 | 0 | 0 | 0 | 0 | −18.88 | 0.53 | 0.92 |
| P16401 | HIST1H1B | 3\|4\|5 | 12 | 4 | 8\|6\|5 | 0 | 0 | 0 | 0 | 0 | −21.48 | 0.63 | 0.92 |
| Q9UBX3 | SLC25A10 | 5\|5\|5 | 15 | 5 | 2\|5\|4 | 0 | 0 | 0 | 0 | 0 | −8.5 | 1.36 | 0.86 |
| Q9HC07 | TMEM165 | 4\|2\|3 | 9 | 3 | 2\|3\|3 | 0 | 0 | 0 | 0 | 0 | −9.34 | 1.12 | 0.85 |
| Q9NR12 | PDLIM7 | 15\|13\|12 | 40 | 13.33 | 13\|12\|10 | 0 | 0 | 0 | 0 | 0 | −26.53 | 1.14 | 0.91 |
| P28838-2 | LAP3 | 8\|7\|12 | 27 | 9 | 5\|6\|6 | 0 | 0 | 0 | 0 | 0 | −12.64 | 1.59 | 0.84 |
| P35613-2 | BSG | 8\|5\|8 | 21 | 7 | 5\|7\|5 | 0 | 0 | 0 | 0 | 0 | −15.55 | 1.24 | 0.89 |
| Q86X55-1 | CARM1 | 5\|4\|4 | 13 | 4.33 | 5\|5\|2 | 0 | 0 | 0 | 0 | 0 | −11.11 | 1.08 | 0.88 |
| O95782-2 | AP2A1 | 5\|7\|5 | 17 | 5.67 | 6\|5\|7 | 0 | 0 | 0 | 0 | 0 | −16.7 | 0.94 | 0.9 |
| O94979-6 | SEC31A | 6\|7\|7 | 20 | 6.67 | 4\|12\|9 | 0 | 0 | 0 | 0 | 0 | −23.45 | 0.8 | 0.92 |
| P13010 | XRCC5 | 38\|36\|43 | 117 | 39 | 45\|51\|49 | 0 | 0 | 0 | 0 | 0 | −122.42 | 0.81 | 0.92 |
| Q96IU4 | ABHD14B | 3\|3\|3 | 9 | 3 | 2\|3\|2 | 0 | 0 | 0 | 0 | 0 | −6.68 | 1.29 | 0.84 |
| Q9BW92 | TARS2 | 2\|0\|2 | 4 | 1.33 | 3\|2\|3 | 0 | 0 | 0 | 0 | 0 | −13.44 | 0.5 | 0.92 |
| P27824 | CANX | 10\|8\|8 | 26 | 8.67 | 6\|6\|8 | 0 | 0 | 0 | 0 | 0 | −14.71 | 1.3 | 0.89 |
| P40763-3 | STAT3 | 9\|7\|8 | 24 | 8 | 14\|10\|14 | 0 | 0 | 0 | 0 | 0 | −38.47 | 0.63 | 0.92 |
| P62906 | RPL10A | 10\|7\|10 | 27 | 9 | 10\|11\|11 | 0 | 0 | 0 | 0 | 0 | −30.74 | 0.84 | 0.92 |
| P83731 | RPL24 | 8\|9\|7 | 24 | 8 | 6\|5\|7 | 0 | 0 | 0 | 0 | 0 | −13.81 | 1.33 | 0.89 |
| O95071-2 | UBR5 | 3\|2\|3 | 8 | 2.67 | 12\|8\|7 | 0 | 0 | 0 | 0 | 0 | −34.75 | 0.3 | 0.92 |
| P28070 | PSMB4 | 4\|3\|3 | 10 | 3.33 | 4\|3\|4 | 0 | 0 | 0 | 0 | 0 | −11.41 | 0.91 | 0.88 |
| P52565 | ARHGDIA | 11\|5\|12 | 28 | 9.33 | 8\|11\|10 | 0 | 0 | 0 | 0 | 0 | −30.63 | 0.97 | 0.91 |
| Q15393 | SF3B3 | 4\|2\|4 | 10 | 3.33 | 7\|4\|2 | 0 | 0 | 0 | 0 | 0 | −15.52 | 0.77 | 0.92 |
| Q96T51 | RUFY1 | 2\|2\|3 | 7 | 2.33 | 4\|2\|0 | 0 | 0.01 | 0 | 0.01 | 0 | −6.72 | 1.17 | 0.83 |
| Q9Y2W1 | THRAP3 | 6\|4\|7 | 17 | 5.67 | 6\|9\|8 | 0 | 0 | 0 | 0 | 0 | −24.75 | 0.74 | 0.92 |
| O60563 | CCNT1 | 4\|3\|8 | 15 | 5 | 5\|4\|6 | 0 | 0 | 0 | 0 | 0 | −16.28 | 1 | 0.88 |
| Q9UMR2 | DDX19B | 4\|3\|5 | 12 | 4 | 7\|2\|7 | 0 | 0 | 0 | 0 | 0 | −17.47 | 0.75 | 0.92 |
| P35908 | KRT2 | 38\|32\|20 | 90 | 30 | 41\|51\|33 | 0 | 0 | 0 | 0 | 0 | −126.75 | 0.72 | 0.92 |
| Q8IY37 | DHX37 | 0\|0\|2 | 2 | 0.67 | 2\|2\|2 | 0 | 0 | 0 | 0 | 0 | −10.49 | 0.33 | 0.92 |
| P53004 | BLVRA | 0\|3\|4 | 7 | 2.33 | 4\|2\|3 | 0 | 0 | 0 | 0 | 0 | −14.8 | 0.78 | 0.86 |
| Q8N6H7 | ARFGAP2 | 4\|4\|3 | 11 | 3.67 | 5\|4\|3 | 0 | 0 | 0 | 0 | 0 | −12.55 | 0.92 | 0.92 |
| Q9Y305-3 | ACOT9 | 3\|7\|9 | 19 | 6.33 | 5\|7\|3 | 0 | 0 | 0 | 0 | 0 | −16.28 | 1.27 | 0.86 |
| P00558 | PGK1 | 31\|30\|31 | 92 | 30.67 | 31\|29\|28 | 0 | 0 | 0 | 0 | 0 | −62.68 | 1.05 | 0.92 |
| Q9Y2Z0-2 | SUGT1 | 2\|3\|2 | 7 | 2.33 | 2\|3\|4 | 0 | 0 | 0 | 0 | 0 | −10.47 | 0.78 | 0.92 |
| Q14137-2 | BOP1 | 5\|2\|0 | 7 | 2.33 | 0\|4\|4 | 0 | 0.01 | 0 | 0.01 | 0 | −13.27 | 0.88 | 0.83 |
| Q13428-3 | TCOF1 | 0\|0\|4 | 4 | 1.33 | 14\|15\|8 | 0 | 0 | 0 | 0 | 0 | −56.15 | 0.11 | 0.92 |
| Q9BY77-2 | POLDIP3 | 3\|3\|4 | 10 | 3.33 | 3\|2\|3 | 0 | 0 | 0 | 0 | 0 | −7.86 | 1.25 | 0.85 |
| Q13428-7 | TCOF1 | 0\|0\|4 | 4 | 1.33 | 14\|16\|7 | 0 | 0 | 0 | 0 | 0 | −55.94 | 0.11 | 0.92 |
| Q05048 | CSTF1 | 5\|3\|3 | 11 | 3.67 | 4\|5\|4 | 0 | 0 | 0 | 0 | 0 | −13.81 | 0.85 | 0.89 |
| Q5VT06 | CEP350 | 14\|17\|24 | 55 | 18.33 | 35\|43\|36 | 0 | 0 | 0 | 0 | 0 | −125.55 | 0.48 | 0.92 |
| Q92621 | NUP205 | 2\|0\|3 | 5 | 1.67 | 2\|3\|3 | 0 | 0 | 0 | 0 | 0 | −13.44 | 0.63 | 0.87 |
| P09382 | LGALS1 | 3\|0\|4 | 7 | 2.33 | 3\|3\|4 | 0 | 0 | 0 | 0 | 0 | −16.29 | 0.7 | 0.88 |
| P53396 | ACLY | 46\|44\|43 | 133 | 44.33 | 44\|42\|45 | 0 | 0 | 0 | 0 | 0 | −94.34 | 1.02 | 0.92 |
| O76021 | RSL1D1 | 2\|2\|2 | 6 | 2 | 7\|5\|5 | 0 | 0 | 0 | 0 | 0 | −20.94 | 0.35 | 0.92 |
| Q9NYB9-2 | ABI2 | 3\|2\|3 | 8 | 2.67 | 4\|6\|3 | 0 | 0 | 0 | 0 | 0 | −15.6 | 0.62 | 0.92 |
| P41227 | NAA10 | 3\|6\|5 | 14 | 4.67 | 5\|3\|6 | 0 | 0 | 0 | 0 | 0 | −15.06 | 1 | 0.89 |
| P29353-3 | SHC1 | 7\|4\|6 | 17 | 5.67 | 6\|6\|8 | 0 | 0 | 0 | 0 | 0 | −20.88 | 0.85 | 0.9 |
| P49207 | RPL34 | 4\|5\|3 | 12 | 4 | 5\|4\|3 | 0 | 0 | 0 | 0 | 0 | −12.55 | 1 | 0.88 |
| O75717 | WDHD1 | 0\|0\|2 | 2 | 0.67 | 0\|3\|5 | 0 | 0 | 0 | 0 | 0 | −13.21 | 0.25 | 0.92 |
| P47897-2 | QARS | 3\|4\|0 | 7 | 2.33 | 4\|5\|0 | 0 | 0 | 0 | 0 | 0 | −14.48 | 0.78 | 0.86 |
| Q8IWR0 | ZC3H7A | 3\|3\|5 | 11 | 3.67 | 3\|4\|3 | 0 | 0 | 0 | 0 | 0 | −10.22 | 1.1 | 0.86 |
| Q02809 | PLOD1 | 14\|11\|18 | 43 | 14.33 | 11\|8\|7 | 0 | 0 | 0 | 0 | 0 | −17.44 | 1.65 | 0.87 |
| Q9HCS7 | XAB2 | 0\|0\|2 | 2 | 0.67 | 50\|55\|51 | 0 | 0 | 0 | 0 | 0 | −233.9 | 0.01 | 0.92 |
| Q9NR50-3 | EIF2B3 | 3\|0\|3 | 6 | 2 | 4\|3\|4 | 0 | 0 | 0 | 0 | 0 | −17.76 | 0.55 | 0.92 |
| P06899 | HIST1H2BJ | 3\|3\|4 | 10 | 3.33 | 6\|9\|6 | 0 | 0 | 0 | 0 | 0 | −24.11 | 0.48 | 0.92 |
| P07384 | CAPN1 | 0\|3\|3 | 6 | 2 | 4\|5\|0 | 0 | 0 | 0 | 0 | 0 | −14.48 | 0.67 | 0.92 |
| Q9NZ01 | TECR | 5\|2\|5 | 12 | 4 | 5\|5\|5 | 0 | 0 | 0 | 0 | 0 | −18.21 | 0.8 | 0.92 |
| Q16531 | DDB1 | 3\|3\|4 | 10 | 3.33 | 3\|5\|8 | 0 | 0 | 0 | 0 | 0 | −17.6 | 0.63 | 0.92 |
| P06576 | ATP5B | 7\|12\|7 | 26 | 8.67 | 9\|9\|11 | 0 | 0 | 0 | 0 | 0 | −26.97 | 0.9 | 0.91 |
| O75150 | RNF40 | 3\|5\|3 | 11 | 3.67 | 4\|4\|5 | 0 | 0 | 0 | 0 | 0 | −13.81 | 0.85 | 0.89 |
| O75153 | CLUH | 6\|3\|4 | 13 | 4.33 | 8\|4\|5 | 0 | 0 | 0 | 0 | 0 | −18.88 | 0.76 | 0.9 |
| O75152 | ZC3H11A | 0\|0\|2 | 2 | 0.67 | 2\|3\|3 | 0 | 0 | 0 | 0 | 0 | −13.44 | 0.25 | 0.92 |
| Q02218-2 | OGDH | 2\|0\|0 | 2 | 0.67 | 2\|4\|5 | 0 | 0 | 0 | 0 | 0 | −17.76 | 0.18 | 0.92 |
| Q15717 | ELAVL1 | 7\|9\|11 | 27 | 9 | 10\|8\|9 | 0 | 0 | 0 | 0 | 0 | −24.48 | 1 | 0.91 |
| P07954-2 | FH | 2\|2\|4 | 8 | 2.67 | 2\|4\|4 | 0 | 0 | 0 | 0 | 0 | −11.76 | 0.8 | 0.88 |
| O60749-2 | SNX2 | 2\|0\|0 | 2 | 0.67 | 2\|4\|3 | 0 | 0 | 0 | 0 | 0 | −14.8 | 0.22 | 0.92 |
| O43432-4 | EIF4G3 | 2\|0\|5 | 7 | 2.33 | 2\|7\|4 | 0 | 0 | 0 | 0 | 0 | −20.58 | 0.54 | 0.89 |
| P36404-2 | ARL2 | 2\|4\|3 | 9 | 3 | 2\|3\|3 | 0 | 0 | 0 | 0 | 0 | −9.34 | 1.12 | 0.85 |
| Q96FW1 | OTUB1 | 6\|4\|5 | 15 | 5 | 6\|8\|8 | 0 | 0 | 0 | 0 | 0 | −23.44 | 0.68 | 0.92 |
| P36578 | RPL4 | 44\|46\|42 | 132 | 44 | 39\|40\|44 | 0 | 0 | 0 | 0 | 0 | −86.4 | 1.07 | 0.92 |
| P63173 | RPL38 | 12\|12\|12 | 36 | 12 | 13\|10\|9 | 0 | 0 | 0 | 0 | 0 | −23.01 | 1.12 | 0.91 |
| P30508 | HLA-C | 5\|5\|0 | 10 | 3.33 | 6\|6\|4 | 0 | 0 | 0 | 0 | 0 | −25.05 | 0.63 | 0.92 |
| Q05639 | EEF1A2 | 24\|23\|20 | 67 | 22.33 | 27\|25\|25 | 0 | 0 | 0 | 0 | 0 | −64.78 | 0.87 | 0.92 |
| Q9BY44 | EIF2A | 8\|7\|16 | 31 | 10.33 | 9\|5\|9 | 0 | 0 | 0 | 0 | 0 | −19.69 | 1.35 | 0.86 |
| P12004 | PCNA | 11\|9\|8 | 28 | 9.33 | 9\|11\|16 | 0 | 0 | 0 | 0 | 0 | −34.08 | 0.78 | 0.92 |
| Q9BQ67 | GRWD1 | 3\|3\|4 | 10 | 3.33 | 5\|4\|6 | 0 | 0 | 0 | 0 | 0 | −16.28 | 0.67 | 0.92 |
| P07951-3 | TPM2 | 0\|0\|2 | 2 | 0.67 | 2\|2\|2 | 0 | 0 | 0 | 0 | 0 | −10.49 | 0.33 | 0.92 |
| O95758-1 | PTBP3 | 2\|0\|0 | 2 | 0.67 | 3\|2\|0 | 0 | 0 | 0 | 0 | 0 | −9.18 | 0.4 | 0.84 |
| P22314-2 | UBA1 | 3\|4\|5 | 12 | 4 | 4\|4\|3 | 0 | 0 | 0 | 0 | 0 | −11.41 | 1.09 | 0.87 |

[symbol]

indicates data missing or illegible when filed

TABLE 12
SAINT N-Turbo vs. Control
N-term Bait

| | | | | | | | | | | | log- | Fold- | |
|---|---|---|---|---|---|---|---|---|---|---|---|---|---|
| Prey | PreyGene | Spec | SpecSum | AvgSpec | ctrlCounts | AvgP | MaxP | TopoAvgP | TopoMaxP | SaintScore | OddsScore | Change | BFDR |
| Q63HN8 | RNF213 | 46\|450\|44 | 1338 | 446 | 34\|39\|43 | 1 | 1 | 3 | 1 | 1 | 396.34 | 11.53 | 0 |
| Q16850-2 | CYP51A1 | 3\|4\|4 | 11 | 3.67 | 0\|0\|0 | 0.98 | 0.99 | 0.98 | 0.99 | 0.98 | 3.17 | 36.67 | 0 |
| O96013 | PAK4 | 3\|3\|5 | 11 | 3.67 | 0\|0\|0 | 0.97 | 3 | 0.97 | 1 | 0.97 | 3.17 | 36.67 | 0.01 |
| O15269 | SPTLC1 | 2\|4\|4 | 10 | 3.33 | 0\|0\|0 | 0.93 | 0.99 | 0.93 | 0.99 | 0.93 | 1.33 | 33.33 | 0.02 |
| Q86SQ0-2 | PHLDB2 | 3\|5\|2 | 10 | 3.33 | 0\|0\|0 | 0.92 | 1 | 0.92 | 1 | 0.92 | 1.33 | 33.33 | 0.03 |
| Q969X6-2 | UTP4 | 5\|3\|2 | 10 | 3.33 | 0\|0\|0 | 0.92 | 3 | 0.92 | 1 | 0.92 | 1.33 | 33.33 | 0.03 |
| ASYKK6 | CNOT1 | 3\|4\|2 | 9 | 3 | 0\|0\|0 | 0.91 | 0.99 | 0.91 | 0.99 | 0.91 | 1.33 | 30 | 0.05 |
| Q02750-2 | MAP2K1 | 2\|3\|4 | 9 | 3 | 0\|0\|0 | 0.91 | 0.99 | 0.91 | 0.99 | 0.91 | 1.33 | 30 | 0.05 |
| Q15773 | MLF2 | 2\|3\|3 | 8 | 2.67 | 0\|0\|0 | 0.9 | 0.96 | 0.9 | 0.96 | 0.9 | 1.33 | 26.67 | 0.06 |
| Q99755-3 | PIPSK1A | 2\|3\|3 | 8 | 2.67 | 0\|0\|0 | 0.9 | 0.96 | 0.9 | 0.96 | 0.9 | 1.33 | 26.67 | 0.06 |
| Q9NQC7-2 | CYLD | 2\|3\|2 | 7 | 2.33 | 0\|0\|0 | 0.85 | 0.96 | 0.85 | 0.96 | 0.85 | 1.33 | 23.33 | 0.07 |
| O75477 | ERLIN1 | 2\|2\|2 | 6 | 2 | 0\|0\|0 | 0.79 | 0.79 | 0.79 | 0.79 | 0.79 | 1.33 | 20 | 0.07 |
| Q14119 | VEZF1 | 8\|0\|5 | 13 | 4.33 | 0\|0\|0 | 0.67 | 1 | 0.67 | 1 | 0.67 | −3.21 | 43.33 | 0.08 |
| Q08AE8-2 | SPIRE1 | 4\|6\|0 | 10 | 3.33 | 0\|0\|0 | 0.66 | 3 | 0.66 | 1 | 0.66 | −3.21 | 33.33 | 0.1 |
| Q13045-2 | FLII | 4\|0\|3 | 7 | 2.33 | 0\|0\|0 | 0.65 | 0.99 | 0.65 | 0.99 | 0.65 | −3.21 | 23.33 | 0.12 |
| Q6P1L5 | FAM117B | 0\|3\|3 | 6 | 2 | 0\|0\|0 | 0.64 | 0.96 | 0.64 | 0.96 | 0.64 | −3.21 | 20 | 0.14 |
| Q6XZF7 | DNMBP | 3\|0\|3 | 6 | 2 | 0\|0\|0 | 0.64 | 0.96 | 0.64 | 0.96 | 0.64 | −3.21 | 20 | 0.14 |
| Q96CB8 | INTS12 | 0\|2\|5 | 7 | 2.33 | 0\|0\|0 | 0.6 | 1 | 0.6 | 1 | 0.6 | −3.21 | 23.33 | 0.16 |
| Q725Q1-7 | CPEB2 | 4\|2\|0 | 6 | 2 | 0\|0\|0 | 0.59 | 0.99 | 0.59 | 0.99 | 0.59 | −3.21 | 20 | 0.18 |
| Q15154-4 | PCM1 | 4\|0\|2 | 6 | 2 | 0\|0\|0 | 0.59 | 0.99 | 0.59 | 0.99 | 0.59 | −3.21 | 20 | 0.18 |
| P22061 | PCMT1 | 0\|4\|2 | 6 | 2 | 0\|0\|0 | 0.59 | 0.99 | 0.59 | 0.99 | 0.59 | −3.21 | 20 | 0.18 |
| P30533 | LRPAP1 | 2\|0\|4 | 6 | 2 | 0\|0\|0 | 0.59 | 0.99 | 0.59 | 0.99 | 0.59 | −3.21 | 20 | 0.18 |
| Q13131 | PRKAA1 | 3\|0\|2 | 5 | 1.67 | 0\|0\|0 | 0.58 | 0.96 | 0.58 | 0.96 | 0.58 | −3.21 | 16.67 | 0.22 |
| Q99456 | KRT12 | 2\|3\|0 | 5 | 1.67 | 0\|0\|0 | 0.58 | 0.96 | 0.58 | 0.96 | 0.58 | −3.21 | 16.67 | 0.22 |
| Q92616 | GCN1 | 0\|3\|2 | 5 | 1.67 | 0\|0\|0 | 0.58 | 0.96 | 0.58 | 0.96 | 0.58 | −3.21 | 16.67 | 0.22 |
| Q9UHD2 | TBK1 | 2\|3\|0 | 5 | 1.67 | 0\|0\|0 | 0.58 | 0.96 | 0.58 | 0.96 | 0.58 | −3.21 | 16.67 | 0.22 |
| P62857 | RPS28 | 2\|0\|3 | 5 | 1.67 | 0\|0\|0 | 0.58 | 0.96 | 0.58 | 0.96 | 0.58 | −3.21 | 16.67 | 0.22 |
| Q9HD45 | TM9SF3 | 2\|3\|0 | 5 | 1.67 | 0\|0\|0 | 0.58 | 0.96 | 0.58 | 0.96 | 0.58 | −3.21 | 16.67 | 0.22 |
| O60716-21 | CTNND1 | 2\|0\|3 | 5 | 1.67 | 0\|0\|0 | 0.58 | 0.96 | 0.58 | 0.96 | 0.58 | −3.21 | 16.67 | 0.22 |
| P82650 | MRPS22 | 2\|0\|3 | 5 | 1.67 | 0\|0\|0 | 0.58 | 0.96 | 0.58 | 0.96 | 0.58 | −3.21 | 16.67 | 0.22 |
| P06789 | P06789 | 0\|3\|2 | 5 | 1.67 | 0\|0\|0 | 0.58 | 0.96 | 0.58 | 0.96 | 0.58 | −3.21 | 16.67 | 0.22 |
| P31751-2 | AKT2 | 2\|3\|0 | 5 | 1.67 | 0\|0\|0 | 0.58 | 0.96 | 0.58 | 0.96 | 0.58 | −3.21 | 16.67 | 0.22 |
| A6NED2 | RCCD1 | 2\|0\|3 | 5 | 1.67 | 0\|0\|0 | 0.58 | 0.96 | 0.58 | 0.96 | 0.58 | −3.21 | 16.67 | 0.22 |
| Q8NB46 | ANKRD52 | 0\|3\|2 | 5 | 1.67 | 0\|0\|0 | 0.58 | 0.96 | 0.58 | 0.96 | 0.58 | −3.21 | 16.67 | 0.22 |
| Q9UGR2 | ZC3H78 | 3\|2\|0 | 5 | 1.67 | 0\|0\|0 | 0.58 | 0.96 | 0.58 | 0.96 | 0.58 | −3.21 | 16.67 | 0.22 |
| Q92625 | ANKS1A | 0\|2\|3 | 5 | 1.67 | 0\|0\|0 | 0.58 | 0.96 | 0.58 | 0.96 | 0.58 | −3.21 | 16.67 | 0.22 |
| Q9NX74 | DUS2 | 2\|2\|0 | 4 | 1.33 | 0\|0\|0 | 0.53 | 0.79 | 0.53 | 0.79 | 0.53 | −3.21 | 13.33 | 0.29 |
| Q9Y232-3 | CDYL | 2\|0\|2 | 4 | 1.33 | 0\|0\|0 | 0.53 | 0.79 | 0.53 | 0.79 | 0.53 | −3.21 | 13.33 | 0.29 |
| O14925 | TIMM23 | 2\|2\|0 | 4 | 1.33 | 0\|0\|0 | 0.53 | 0.79 | 0.53 | 0.79 | 0.53 | −3.21 | 13.33 | 0.29 |
| Q9UI30 | TRMT112 | 2\|0\|2 | 4 | 1.33 | 0\|0\|0 | 0.53 | 0.79 | 0.53 | 0.79 | 0.53 | −3.21 | 13.33 | 0.29 |
| Q9UN86-2 | G3BP2 | 2\|0\|2 | 4 | 1.33 | 0\|0\|0 | 0.53 | 0.79 | 0.53 | 0.79 | 0.53 | −3.21 | 13.33 | 0.29 |
| P02662 | P02662 | 2\|0\|2 | 0 | 1.33 | 0\|0\|0 | 0.53 | 0.79 | 0.53 | 0.79 | 0.53 | −3.21 | 13.33 | 0.29 |
| Q9Y3P9 | RABGAP1 | 2\|2\|0 | 4 | 1.33 | 0\|0\|0 | 0.53 | 0.79 | 0.53 | 0.79 | 0.53 | −3.21 | 13.33 | 0.29 |
| P14373-2 | TRIM27 | 2\|2\|0 | 4 | 1.33 | 0\|0\|0 | 0.53 | 0.79 | 0.53 | 0.79 | 0.53 | −3.21 | 13.33 | 0.29 |
| P45973 | CBXS | 2\|2\|0 | 4 | 1.33 | 0\|0\|0 | 0.53 | 0.79 | 0.53 | 0.79 | 0.53 | −3.21 | 13.33 | 0.29 |
| Q9H0W8-2 | SMG9 | 0\|2\|2 | 4 | 1.33 | 0\|0\|0 | 0.53 | 0.79 | 0.53 | 0.79 | 0.53 | −3.21 | 13.33 | 0.29 |
| P78312-4 | FAM193A | 2\|0\|2 | 4 | 1.33 | 0\|0\|0 | 0.53 | 0.79 | 0.53 | 0.79 | 0.53 | −3.21 | 13.33 | 0.29 |
| P14635-2 | CCNB1 | 2\|0\|2 | 4 | 1.33 | 0\|0\|0 | 0.53 | 0.79 | 0.53 | 0.79 | 0.53 | −3.21 | 13.33 | 0.29 |
| P08574 | CYC1 | 2\|0\|2 | 4 | 1.33 | 0\|0\|0 | 0.53 | 0.79 | 0.53 | 0.79 | 0.53 | −3.21 | 13.33 | 0.29 |
| Q9Y6B6 | SAR1B | 2\|2\|0 | 0 | 1.33 | 0\|0\|0 | 0.53 | 0.79 | 0.53 | 0.79 | 0.53 | −3.21 | 13.33 | 0.29 |
| O75128 | COBL | 2\|2\|0 | 4 | 1.33 | 0\|0\|0 | 0.53 | 0.79 | 0.53 | 0.79 | 0.53 | −3.21 | 13.33 | 0.29 |
| Q99755-4 | PIPSK1A | 0\|2\|2 | 4 | 1.33 | 0\|0\|0 | 0.53 | 0.79 | 0.53 | 0.79 | 0.53 | −3.21 | 13.33 | 0.29 |
| O60493-4 | SNX3 | 2\|2\|0 | 4 | 1.33 | 0\|0\|0 | 0.53 | 0.79 | 0.53 | 0.79 | 0.53 | −3.21 | 13.33 | 0.29 |
| Q15155 | NOMO1 | 2\|2\|0 | 4 | 1.33 | 0\|0\|0 | 0.53 | 0.79 | 0.53 | 0.79 | 0.53 | −3.21 | 13.33 | 0.29 |
| Q9BSH4 | TACO1 | 2\|0\|2 | 4 | 1.33 | 0\|0\|0 | 0.53 | 0.79 | 0.53 | 0.79 | 0.53 | −3.21 | 13.33 | 0.29 |
| Q7Z739 | YTHDF3 | 2\|0\|2 | 4 | 1.33 | 0\|0\|0 | 0.53 | 0.79 | 0.53 | 0.79 | 0.53 | −3.21 | 13.33 | 0.29 |
| P08865 | RPSA | 6\|4\|4 | 14 | 4.67 | 0\|0\|2 | 0.52 | 0.75 | 0.52 | 0.75 | 0.52 | −0.37 | 7 | 0.36 |
| O75592-2 | MYCBP2 | 2\|5\|5 | 12 | 4 | 0\|2\|0 | 0.43 | 0.59 | 0.43 | 0.59 | 0.43 | −2.03 | 6 | 0.36 |
| Q6P2H3-2 | CEP85 | 8\|3\|2 | 13 | 4.33 | 2\|0\|0 | 0.43 | 0.92 | 0.43 | 0.92 | 0.43 | −2.03 | 6.5 | 0.36 |
| O95630-2 | STAMBP | 2\|8\|2 | 12 | 4 | 0\|0\|2 | 0.38 | 0.92 | 0.38 | 0.92 | 0.38 | −2.03 | 6 | 0.37 |
| P45974-2 | USPS | 6\|8\|9 | 23 | 7.67 | 4\|2\|0 | 0.37 | 0.58 | 0.37 | 0.58 | 0.37 | −1.89 | 3.83 | 0.37 |
| Q65193-2 | FAM111B | 4\|0\|0 | 4 | 1.33 | 0\|0\|0 | 0.33 | 0.99 | 0.33 | 0.99 | 0.33 | −3.21 | 13.33 | 0.38 |
| Q7Z4G4-3 | TRMT11 | 0\|4\|0 | 4 | 1.33 | 0\|0\|0 | 0.33 | 0.99 | 0.33 | 0.99 | 0.33 | −3.21 | 13.33 | 0.38 |
| P16989-2 | YBX3 | 0\|0\|4 | 4 | 1.33 | 0\|0\|0 | 0.33 | 0.99 | 0.33 | 0.99 | 0.33 | −3.21 | 13.33 | 0.38 |
| O8N108-2 | NCOA7 | 4\|0\|0 | 4 | 1.33 | 0\|0\|0 | 0.33 | 0.99 | 0.33 | 0.99 | 0.33 | −3.21 | 13.33 | 0.38 |
| Q00537 | CDK17 | 3\|0\|0 | 3 | 1 | 0\|0\|0 | 0.32 | 0.96 | 0.32 | 0.96 | 0.32 | −3.21 | 10 | 0.39 |
| Q04323 | UBXN | 3\|0\|0 | 3 | 1 | 0\|0\|0 | 0.32 | 0.96 | 0.32 | 0.96 | 0.32 | −3.21 | 10 | 0.39 |
| P98082-3 | DAB2 | 3\|0\|0 | 3 | 1 | 0\|0\|0 | 0.32 | 0.96 | 0.32 | 0.96 | 0.32 | −3.21 | 10 | 0.39 |
| P09001 | MRPL3 | 3\|0\|0 | 3 | 1 | 0\|0\|0 | 0.32 | 0.96 | 0.32 | 0.96 | 0.32 | −3.21 | 10 | 0.39 |
| Q9NZM1-2 | MYOF | 0\|3\|0 | 3 | 1 | 0\|0\|0 | 0.32 | 0.96 | 0.32 | 0.96 | 0.32 | −3.21 | 10 | 0.39 |
| Q13126-4 | MTAP | 0\|0\|3 | 3 | 1 | 0\|0\|0 | 0.32 | 0.96 | 0.32 | 0.96 | 0.32 | −3.21 | 10 | 0.39 |
| Q15208 | STK38 | 0\|3\|0 | 3 | 1 | 0\|0\|0 | 0.32 | 0.96 | 0.32 | 0.96 | 0.32 | −3.21 | 10 | 0.39 |
| Y6C9 | MTCH2 | 0\|0\|3 | 3 | 1 | 0\|0\|0 | 0.32 | 0.96 | 0.32 | 0.96 | 0.32 | −3.21 | 10 | 0.39 |
| Q9ULV3-5 | CIZ1 | 0\|0\|3 | 3 | 1 | 0\|0\|0 | 0.32 | 0.96 | 0.32 | 0.96 | 0.32 | −3.21 | 10 | 0.39 |
| Q12899 | TRIM26 | 0\|3\|0 | 3 | 1 | 0\|0\|0 | 0.32 | 0.96 | 0.32 | 0.96 | 0.32 | −3.21 | 10 | 0.39 |
| Q96SU4-5 | OSBPL9 | 3\|0\|0 | 3 | 1 | 0\|0\|0 | 0.32 | 0.96 | 0.32 | 0.96 | 0.32 | −3.21 | 10 | 0.39 |
| O95391 | SLU7 | 0\|0\|3 | 3 | 1 | 0\|0\|0 | 0.32 | 0.96 | 0.32 | 0.96 | 0.32 | −3.21 | 10 | 0.39 |
| Q9NX46 | ADPRHL2 | 3\|0\|0 | 3 | 1 | 0\|0\|0 | 0.32 | 0.96 | 0.32 | 0.96 | 0.32 | −3.21 | 10 | 0.39 |
| Q9NRG9-2 | AAAS | 0\|0\|3 | 3 | 1 | 0\|0\|0 | 0.32 | 0.96 | 0.32 | 0.96 | 0.32 | −3.21 | 10 | 0.39 |
| Q7L099-2 | RUFY3 | 0\|0\|3 | 3 | 3 | 010\|0 | 0.32 | 0.96 | 0.32 | 0.96 | 0.32 | −3.21 | 10 | 0.39 |
| Q6IN84 | MRM1 | 0\|3\|0 | 3 | 1 | 0\|0\|0 | 0.32 | 0.96 | 0.32 | 0.96 | 0.32 | −3.21 | 10 | 0.39 |
| P20618 | PSMB1 | 0\|0\|3 | 3 | 3 | 0\|0\|0 | 0.32 | 0.96 | 0.32 | 0.96 | 0.32 | −3.21 | 10 | 0.39 |
| Q13564-3 | NAE1 | 0\|0\|3 | 3 | 1 | 0\|0\|0 | 0.32 | 0.96 | 0.32 | 0.96 | 0.32 | −3.21 | 10 | 0.39 |
| Q13057 | COASY | 3\|0\|0 | 3 | 1 | 0\|0\|0 | 0.32 | 0.96 | 0.32 | 0.96 | 0.32 | −3.21 | 10 | 0.39 |
| O60547-2 | GMDS | 0\|0\|3 | 3 | 1 | 0\|0\|0 | 0.32 | 0.96 | 0.32 | 0.96 | 0.32 | −3.21 | 10 | 0.39 |
| Q9UM82 | SPATA2 | 4\|2\|4 | 10 | 3.33 | 2\|0\|0 | 0.31 | 0.41 | 0.31 | 0.41 | 0.31 | −2.03 | 5 | 0.46 |
| Q9UQ13-2 | SHOC2 | 3\|3\|4 | 10 | 3.33 | 2\|0\|0 | 0.3 | 0.41 | 0.3 | 0.41 | 0.3 | −1.16 | 5 | 0.46 |
| Q6ZNB6 | NFXL1 | 3\|2\|6 | 11 | 3.67 | 2\|0\|2 | 0.28 | 0.8 | 0.28 | 0.8 | 0.28 | −4.67 | 2.75 | 0.47 |
| O6P996-3 | PDXDC1 | 2\|0\|0 | 2 | 0.67 | 0\|0\|0 | 0.26 | 0.79 | 0.26 | 0.79 | 0.26 | −3.21 | 6.67 | 0.47 |
| Q96T60 | PNKP | 2\|0\|0 | 2 | 0.67 | 0\|0\|0 | 0.26 | 0.79 | 0.26 | 0.79 | 0.26 | −3.21 | 6.67 | 0.47 |
| Q9BUN8-2 | DERL1 | 0\|0\|2 | 2 | 0.67 | 0\|0\|0 | 0.26 | 0.79 | 0.26 | 0.79 | 0.26 | −3.21 | 6.67 | 0.47 |
| Q8NHH9-3 | ATL2 | 2\|0\|0 | 2 | 0.67 | 0\|0\|0 | 0.26 | 0.79 | 0.26 | 0.79 | 0.26 | −3.21 | 6.67 | 0.47 |
| O01433-2 | AMPD2 | 0\|2\|0 | 2 | 0.67 | 0\|0\|0 | 0.26 | 0.79 | 0.26 | 0.79 | 0.26 | −3.21 | 6.67 | 0.47 |
| P49593-2 | PPM1F | 2\|0\|0 | 2 | 0.67 | 0\|0\|0 | 0.26 | 0.79 | 0.26 | 0.79 | 0.26 | −3.21 | 6.67 | 0.47 |
| O14444-2 | CAPRIN1 | 2\|0\|0 | 2 | 0.67 | 0\|0\|0 | 0.26 | 0.79 | 0.26 | 0.79 | 0.26 | −3.21 | 6.67 | 0.47 |
| Q96FZ2 | HMCES | 0\|0\|2 | 2 | 0.67 | 0\|0\|0 | 0.26 | 0.79 | 0.26 | 0.79 | 0.26 | −3.21 | 6.67 | 0.47 |
| O15066 | KIF3B | 0\|0\|2 | 2 | 0.67 | 0\|0\|0 | 0.26 | 0.79 | 0.26 | 0.79 | 0.26 | −3.21 | 6.67 | 0.47 |
| Q9NVC6 | MED17 | 0\|2\|0 | 2 | 0.67 | 0\|0\|0 | 0.26 | 0.79 | 0.26 | 0.79 | 0.26 | −3.21 | 6.67 | 0.47 |
| Q9H4H8-2 | FAM83D | 0\|2\|0 | 2 | 0.67 | 0\|0\|0 | 0.26 | 0.79 | 0.26 | 0.79 | 0.26 | −3.21 | 6.67 | 0.47 |
| P19447 | ERCC3 | 2\|0\|0 | 2 | 0.67 | 0\|0\|0 | 0.26 | 0.79 | 0.26 | 0.79 | 0.26 | −3.21 | 6.67 | 0.47 |
| Q6PL18 | ATAD2 | 0\|2\|0 | 2 | 0.67 | 0\|0\|0 | 0.26 | 0.79 | 0.26 | 0.79 | 0.26 | −3.21 | 6.67 | 0.47 |
| P33897 | ABCD1 | 2\|0\|0 | 2 | 0.67 | 0\|0\|0 | 0.26 | 0.79 | 0.26 | 0.79 | 0.26 | −3.21 | 6.67 | 0.47 |
| Q8WWC4 | MAIP1 | 2\|0\|0 | 2 | 0.67 | 0\|0\|0 | 0.26 | 0.79 | 0.26 | 0.79 | 0.26 | −3.21 | 6.67 | 0.47 |
| Q96C19 | EFHD2 | 2\|0\|0 | 2 | 0.67 | 0\|0\|0 | 0.26 | 0.79 | 0.26 | 0.79 | 0.26 | −3.21 | 6.67 | 0.47 |
| Q96R06 | SPAG5 | 0\|0\|2 | 2 | 0.67 | 0\|0\|0 | 0.26 | 0.79 | 0.26 | 0.79 | 0.26 | −3.21 | 6.67 | 0.47 |
| Q9H788-2 | SH2D4A | 0\|2\|0 | 2 | 0.67 | 0\|0\|0 | 0.26 | 0.79 | 0.26 | 0.79 | 0.26 | −3.21 | 6.67 | 0.47 |
| Q9BTC8-2 | MTA3 | 0\|0\|2 | 2 | 0.67 | 0\|0\|0 | 0.26 | 0.79 | 0.26 | 0.79 | 0.26 | −3.21 | 6.67 | 0.47 |
| Q9HAD4 | WDR41 | 2\|0\|0 | 2 | 0.67 | 0\|0\|0 | 0.26 | 0.79 | 0.26 | 0.79 | 0.26 | −3.21 | 6.67 | 0.47 |
| Q9BQ13-2 | EIF2AK1 | 0\|2\|0 | 2 | 0.67 | 0\|0\|0 | 0.26 | 0.79 | 0.26 | 0.79 | 0.26 | −3.21 | 6.67 | 0.47 |
| 095985-3 | TOP3B | 2\|0\|0 | 2 | 0.67 | 0\|0\|0 | 0.26 | 0.79 | 0.26 | 0.79 | 0.26 | −3.21 | 6.67 | 0.47 |
| Q13442 | PDAP1 | 2\|0\|0 | 2 | 0.67 | 0\|0\|0 | 0.26 | 0.79 | 0.26 | 0.79 | 0.26 | −3.21 | 6.67 | 0.47 |
| Q9H3M7-2 | TXNIP | 2\|0\|0 | 2 | 0.67 | 0\|0\|0 | 0.26 | 0.79 | 0.26 | 0.79 | 0.26 | −3.21 | 6.67 | 0.47 |
| Q8N5A5-3 | ZGPAT | 0\|0\|2 | 2 | 0.67 | 0\|0\|0 | 0.26 | 0.79 | 0.26 | 0.79 | 0.26 | −3.21 | 6.67 | 0.47 |
| O00186 | STXBP3 | 0\|2\|0 | 2 | 0.67 | 0\|0\|0 | 0.26 | 0.79 | 0.26 | 0.79 | 0.26 | −3.21 | 6.67 | 0.47 |
| Q969ZO | TBRG4 | 2\|0\|0 | 2 | 0.67 | 0\|0\|0 | 0.26 | 0.79 | 0.26 | 0.79 | 0.26 | −3.21 | 6.67 | 0.47 |
| Q9BQA1-2 | WDR77 | 0\|0\|2 | 2 | 0.67 | 0\|0\|0 | 0.26 | 0.79 | 0.26 | 0.79 | 0.26 | −3.21 | 6.67 | 0.47 |
| P06858 | LPL | 0\|2\|0 | 2 | 0.67 | 0\|0\|0 | 0.26 | 0.79 | 0.26 | 0.79 | 0.26 | −3.21 | 6.67 | 0.47 |
| P50570-2 | DNM2 | 2\|0\|0 | 2 | 0.67 | 0\|0\|0 | 0.26 | 0.79 | 0.26 | 0.79 | 0.26 | −3.21 | 6.67 | 0.47 |
| Q9C0D2 | CEP295 | 0\|2\|0 | 2 | 0.67 | 0\|0\|0 | 0.26 | 0.79 | 0.26 | 0.79 | 0.26 | −3.21 | 6.67 | 0.47 |
| O95835-2 | LATS1 | 0\|0\|2 | 2 | 0.67 | 0\|0\|0 | 0.26 | 0.79 | 0.26 | 0.79 | 0.26 | −3.21 | 6.67 | 0.47 |
| Q9Y3S2 | ZNF330 | 0\|2\|0 | 2 | 0.67 | 0\|0\|0 | 0.26 | 0.79 | 0.26 | 0.79 | 0.26 | −3.21 | 6.67 | 0.47 |
| O95819-4 | MAP4K4 | 0\|0\|2 | 2 | 0.67 | 0\|0\|0 | 0.26 | 0.79 | 0.26 | 0.79 | 0.26 | −3.21 | 6.67 | 0.47 |
| Q9NUQ7 | UFSP2 | 2\|0\|0 | 2 | 0.67 | 0\|0\|0 | 0.26 | 0.79 | 0.26 | 0.79 | 0.26 | −3.21 | 6.67 | 0.47 |
| Q93074-3 | MED12 | 0\|2\|0 | 2 | 0.67 | 0\|0\|0 | 0.26 | 0.79 | 0.26 | 0.79 | 0.26 | −3.21 | 6.67 | 0.47 |
| Q9Y6V7 | DDX49 | 0\|0\|2 | 2 | 0.67 | 0\|0\|0 | 0.26 | 0.79 | 0.26 | 0.79 | 0.26 | −3.21 | 6.67 | 0.47 |
| Q8NCN5 | PDPR | 0\|2\|0 | 2 | 0.67 | 0\|0\|0 | 0.26 | 0.79 | 0.26 | 0.79 | 0.26 | −3.21 | 6.67 | 0.47 |
| Q9P2R3 | ANKFY1 | 0\|0\|2 | 2 | 0.67 | 0\|0\|0 | 0.26 | 0.79 | 0.26 | 0.79 | 0.26 | −3.21 | 6.67 | 0.47 |
| Q9H6R4-4 | NOL6 | 0\|2\|0 | 2 | 0.67 | 0\|0\|0 | 0.26 | 0.79 | 0.26 | 0.79 | 0.26 | −3.21 | 6.67 | 0.47 |
| Q9UMX1 | SUFU | 0\|2\|0 | 2 | 0.67 | 0\|0\|0 | 0.26 | 0.79 | 0.26 | 0.79 | 0.26 | −3.21 | 6.67 | 0.47 |
| Q8N9M1-3 | C19ORF47 | 2\|0\|0 | 2 | 0.67 | 0\|0\|0 | 0.26 | 0.79 | 0.26 | 0.79 | 0.26 | −3.21 | 6.67 | 0.47 |
| Q8NEY1-5 | NAV1 | 0\|2\|0 | 2 | 0.67 | 0\|0\|0 | 0.26 | 0.79 | 0.26 | 0.79 | 0.26 | −3.21 | 6.67 | 0.47 |
| O15294-3 | OGT | 2\|0\|0 | 2 | 0.67 | 0\|0\|0 | 0.26 | 0.79 | 0.26 | 0.79 | 0.26 | −3.21 | 6.67 | 0.47 |
| Q9P0W2-2 | HMG20B | 0\|2\|0 | 2 | 0.67 | 0\|0\|0 | 0.26 | 0.79 | 0.26 | 0.79 | 0.26 | −3.21 | 6.67 | 0.47 |
| Q9NVH1-3 | DNAIC11 | 0\|0\|2 | 2 | 0.67 | 0\|0\|0 | 0.26 | 0.79 | 0.26 | 0.79 | 0.26 | −3.21 | 6.67 | 0.47 |
| Q96A35 | MRPL24 | 2\|0\|0 | 2 | 0.67 | 0\|0\|0 | 0.26 | 0.79 | 0.26 | 0.79 | 0.26 | −3.21 | 6.67 | 0.47 |
| Q9BT92 | TCHP | 2\|0\|0 | 2 | 0.67 | 0\|0\|0 | 0.26 | 0.79 | 0.26 | 0.79 | 0.26 | −3.21 | 6.67 | 0.47 |
| Q7L0Y3 | TRMT10C | 0\|2\|0 | 2 | 0.67 | 0\|0\|0 | 0.26 | 0.79 | 0.26 | 0.79 | 0.26 | −3.21 | 6.67 | 0.47 |
| Q16881-5 | TXNRD1 | 2\|0\|0 | 2 | 0.67 | 0\|0\|0 | 0.26 | 0.79 | 0.26 | 0.79 | 0.26 | −3.21 | 6.67 | 0.47 |
| Q86U44 | METTL3 | 0\|0\|2 | 2 | 0.67 | 0\|0\|0 | 0.26 | 0.79 | 0.26 | 0.79 | 0.26 | −3.21 | 6.67 | 0.47 |
| Q9H479 | FN3K | 0\|2\|0 | 2 | 0.67 | 0\|0\|0 | 0.26 | 0.79 | 0.26 | 0.79 | 0.26 | −3.21 | 6.67 | 0.47 |
| Q9NUL3-4 | STAU2 | 0\|0\|2 | 2 | 0.67 | 0\|0\|0 | 0.26 | 0.79 | 0.26 | 0.79 | 0.26 | −3.21 | 6.67 | 0.47 |
| Q99805 | M9SF2 | 0\|2\|0 | 2 | 0.67 | 0\|0\|0 | 0.26 | 0.79 | 0.26 | 0.79 | 0.26 | −3.21 | 6.67 | 0.47 |
| Q9UM00-1 | TMCO1 | 0\|2\|0 | 2 | 0.67 | 0\|0\|0 | 0.26 | 0.79 | 0.26 | 0.79 | 0.26 | −3.21 | 6.67 | 0.47 |
| Q9NWY4 | HPF1 | 0\|2\|0 | 2 | 0.67 | 0\|0\|0 | 0.26 | 0.79 | 0.26 | 0.79 | 0.26 | −3.21 | 6.67 | 0.47 |
| P55010 | EIFS | 0\|0\|2 | 2 | 0.67 | 0\|0\|0 | 0.26 | 0.79 | 0.26 | 0.79 | 0.26 | −3.21 | 6.67 | 0.47 |
| P29966 | MARCKS | 0\|2\|0 | 2 | 0.67 | 0\|0\|0 | 0.26 | 0.79 | 0.26 | 0.79 | 0.26 | −3.21 | 6.67 | 0.47 |
| Q96S44 | TP53RK | 2\|0\|0 | 2 | 0.67 | 0\|0\|0 | 0.26 | 0.79 | 0.26 | 0.79 | 0.26 | −3.21 | 6.67 | 0.47 |
| Q12933-4 | TRAF2 | 0\|0\|2 | 2 | 0.67 | 0\|0\|0 | 0.26 | 0.79 | 0.26 | 0.79 | 0.26 | −3.21 | 6.67 | 0.47 |
| Q96AG3-3 | SLC25A46 | 0\|2\|0 | 2 | 0.67 | 0\|0\|0 | 0.26 | 0.79 | 0.26 | 0.79 | 0.26 | −3.21 | 6.67 | 0.47 |
| O75794 | CDC123 | 2\|0\|0 | 2 | 0.67 | 0\|0\|0 | 0.26 | 0.79 | 0.26 | 0.79 | 0.26 | −3.21 | 6.67 | 0.47 |
| Q9NP81 | SARS2 | 0\|2\|0 | 2 | 0.67 | 0\|0\|0 | 0.26 | 0.79 | 0.26 | 0.79 | 0.26 | −3.21 | 6.67 | 0.47 |
| Q96IR7 | HPDL | 2\|0\|0 | 2 | 0.67 | 0\|0\|0 | 0.26 | 0.79 | 0.26 | 0.79 | 0.26 | −3.21 | 6.67 | 0.47 |
| P53814-5 | SMTN | 0\|0\|2 | 2 | 0.67 | 0\|0\|0 | 0.26 | 0.79 | 0.26 | 0.79 | 0.26 | −3.21 | 6.67 | 0.47 |
| Q8IWA4 | MFN1 | 0\|2\|0 | 2 | 0.67 | 0\|0\|0 | 0.26 | 0.79 | 0.26 | 0.79 | 0.26 | −3.21 | 6.67 | 0.47 |
| Q9H992-2 | 7-Mar | 0\|0\|2 | 2 | 0.67 | 0\|0\|0 | 0.26 | 0.79 | 0.26 | 0.79 | 0.26 | −3.21 | 6.67 | 0.47 |
| O43314-2 | PPIP5K2 | 0\|2\|0 | 2 | 0.67 | 0\|0\|0 | 0.26 | 0.79 | 0.26 | 0.79 | 0.26 | −3.21 | 6.67 | 0.47 |
| P19838 | NFKB1 | 2\|0\|0 | 2 | 0.67 | 0\|0\|0 | 0.26 | 0.79 | 0.26 | 0.79 | 0.26 | −3.21 | 6.67 | 0.47 |
| P51570 | GALK1 | 2\|0\|0 | 2 | 0.67 | 0\|0\|0 | 0.26 | 0.79 | 0.26 | 0.79 | 0.26 | −3.21 | 6.67 | 0.47 |
| Q9NP97 | DYNLRB1 | 0\|2\|0 | 2 | 0.67 | 0\|0\|0 | 0.26 | 0.79 | 0.26 | 0.79 | 0.26 | −3.21 | 6.67 | 0.47 |
| Q15418-4 | RPS6KA1 | 2\|0\|0 | 2 | 0.67 | 0\|0\|0 | 0.26 | 0.79 | 0.26 | 0.79 | 0.26 | −3.21 | 6.67 | 0.47 |
| P57737-3 | CORO7 | 0\|2\|0 | 2 | 0.67 | 0\|0\|0 | 0.26 | 0.79 | 0.26 | 0.79 | 0.26 | −3.21 | 6.67 | 0.47 |
| Q9Y222-2 | MTO1 | 2\|0\|0 | 2 | 0.67 | 0\|0\|0 | 0.26 | 0.79 | 0.26 | 0.79 | 0.26 | −3.21 | 6.67 | 0.47 |
| Q9H936 | SLC25A22 | 0\|0\|2 | 2 | 0.67 | 0\|0\|0 | 0.26 | 0.79 | 0.26 | 0.79 | 0.26 | −3.21 | 6.67 | 0.47 |
| Q86YZ3 | HRNR | 0\|0\|2 | 2 | 0.67 | 0\|0\|0 | 0.26 | 0.79 | 0.26 | 0.79 | 0.26 | −3.21 | 6.67 | 0.47 |
| Q8WVX9 | FAR1 | 2\|0\|0 | 2 | 0.67 | 0\|0\|0 | 0.26 | 0.79 | 0.26 | 0.79 | 0.26 | −3.21 | 6.67 | 0.47 |
| P21281 | ATP6V1B2 | 0\|2\|0 | 2 | 0.67 | 0\|0\|0 | 0.26 | 0.79 | 0.26 | 0.79 | 0.26 | −3.21 | 6.67 | 0.47 |
| O95983-2 | MBD3 | 0\|0\|2 | 2 | 0.67 | 0\|0\|0 | 0.26 | 0.79 | 0.26 | 0.79 | 0.26 | −3.21 | 6.67 | 0.47 |
| Q9BQL6 | FERMT1 | 0\|0\|2 | 2 | 0.67 | 0\|0\|0 | 0.26 | 0.79 | 0.26 | 0.79 | 0.26 | −3.21 | 6.67 | 0.47 |
| Q9P2Y4 | ZNF219 | 0\|0\|2 | 2 | 0.67 | 0\|0\|0 | 0.26 | 0.79 | 0.26 | 0.79 | 0.26 | −3.21 | 6.67 | 0.47 |
| P18074-2 | ERCC2 | 2\|0\|0 | 2 | 0.67 | 0\|0\|0 | 0.26 | 0.79 | 0.26 | 0.79 | 0.26 | −3.21 | 6.67 | 0.47 |
| Q9NZL9-4 | MAT2B | 2\|0\|0 | 2 | 0.67 | 0\|0\|0 | 0.26 | 0.79 | 0.26 | 0.79 | 0.26 | −3.21 | 6.67 | 0.47 |
| Q9BUB7 | TMEM70 | 0\|2\|0 | 2 | 0.67 | 0\|0\|0 | 0.26 | 0.79 | 0.26 | 0.79 | 0.26 | −3.21 | 6.67 | 0.47 |
| Q53EP0 | FNDC3B | 0\|2\|0 | 2 | 0.67 | 0\|0\|0 | 0.26 | 0.79 | 0.26 | 0.79 | 0.26 | −3.21 | 6.67 | 0.47 |
| O75879 | GATB | 2\|0\|0 | 3 | 0.67 | 0\|0\|0 | 0.26 | 0.79 | 0.26 | 0.79 | 0.26 | −3.21 | 6.67 | 0.47 |
| O75616 | ERAL1 | 2\|0\|0 | 2 | 0.67 | 0\|0\|0 | 0.26 | 0.79 | 0.26 | 0.79 | 0.26 | −3.21 | 6.67 | 0.47 |
| Q05932-3 | FPGS | 0\|2\|0 | 2 | 0.67 | 0\|0\|0 | 0.26 | 0.79 | 0.26 | 0.79 | 0.26 | −3.21 | 6.67 | 0.47 |
| P49642 | PRIM1 | 0\|0\|2 | 2 | 0.67 | 0\|0\|0 | 0.26 | 0.79 | 0.26 | 0.79 | 0.26 | −3.21 | 6.67 | 0.47 |
| P31350 | RRM2 | 0\|2\|0 | 2 | 0.67 | 0\|0\|0 | 0.26 | 0.79 | 0.26 | 0.79 | 0.26 | −3.21 | 6.67 | 0.47 |
| Q2M218-2 | AAK1 | 2\|0\|0 | 2 | 0.67 | 0\|0\|0 | 0.26 | 0.79 | 0.26 | 0.79 | 0.26 | −3.21 | 6.67 | 0.47 |
| Q13371-2 | PDCL | 0\|0\|2 | 2 | 0.67 | 0\|0\|0 | 0.26 | 0.79 | 0.26 | 0.79 | 0.26 | −3.21 | 6.67 | 0.47 |
| Q92888-2 | ARHGEF1 | 0\|2\|0 | 2 | 0.67 | 0\|0\|0 | 0.26 | 0.79 | 0.26 | 0.79 | 0.26 | −3.21 | 6.67 | 0.47 |
| P50747 | HLCS | 2\|0\|0 | 2 | 0.67 | 0\|0\|0 | 0.26 | 0.79 | 0.26 | 0.79 | 0.26 | −3.21 | 6.67 | 0.47 |
| Q7Z3K3-5 | POGZ | 0\|2\|0 | 2 | 0.67 | 0\|0\|0 | 0.26 | 0.79 | 0.26 | 0.79 | 0.26 | −3.21 | 6.67 | 0.47 |
| A6NNY8 | USP27X | 0\|0\|2 | 2 | 0.67 | 0\|0\|0 | 0.26 | 0.79 | 0.26 | 0.79 | 0.26 | −3.21 | 6.67 | 0.47 |
| Q9UKY7-2 | CDV3 | 0\|0\|2 | 2 | 0.67 | 0\|0\|0 | 0.26 | 0.79 | 0.26 | 0.79 | 0.26 | −3.21 | 6.67 | 0.47 |
| P05026-2 | ATP1B1 | 2\|0\|0 | 3 | 0.67 | 0\|0\|0 | 0.26 | 0.79 | 0.26 | 0.79 | 0.26 | −3.21 | 6.67 | 0.47 |
| Q96A49 | SYAP1 | 0\|2\|0 | 2 | 0.67 | 0\|0\|0 | 0.26 | 0.79 | 0.26 | 0.79 | 0.26 | −3.21 | 6.67 | 0.47 |
| Q6IAN0 | DHRS7B | 0\|2\|0 | 2 | 0.67 | 0\|0\|0 | 0.26 | 0.79 | 0.26 | 0.79 | 0.26 | −3.21 | 6.67 | 0.47 |
| P28074 | PSMBS | 2\|0\|0 | 2 | 0.67 | 0\|0\|0 | 0.26 | 0.79 | 0.26 | 0.79 | 0.26 | −3.21 | 6.67 | 0.47 |
| P51114-3 | FXR1 | 0\|2\|0 | 2 | 0.67 | 0\|0\|0 | 0.26 | 0.79 | 0.26 | 0.79 | 0.26 | −3.21 | 6.67 | 0.47 |
| P39019 | RPS19 | 0\|0\|2 | 2 | 0.67 | 0\|0\|0 | 0.26 | 0.79 | 0.26 | 0.79 | 0.26 | −3.21 | 6.67 | 0.47 |
| P60228 | EIF3E | 0\|0\|2 | 2 | 0.67 | 0\|0\|0 | 0.26 | 0.79 | 0.26 | 0.79 | 0.26 | −3.21 | 6.67 | 0.47 |
| Q9BRZ2 | TRIM56 | 0\|0\|2 | 2 | 0.67 | 0\|0\|0 | 0.26 | 0.79 | 0.26 | 0.79 | 0.26 | −3.21 | 6.67 | 0.47 |
| Q9NWU5-1 | MRPL22 | 0\|2\|0 | 2 | 0.67 | 0\|0\|0 | 0.26 | 0.79 | 0.26 | 0.79 | 0.26 | −3.21 | 6.67 | 0.47 |
| Q8WUB8-3 | PHF10 | 0\|0\|2 | 2 | 0.67 | 0\|0\|0 | 0.26 | 0.79 | 0.26 | 0.79 | 0.26 | −3.21 | 6.67 | 0.47 |
| Q9Y217 | PIKFYVE | 2\|0\|0 | 2 | 0.67 | 0\|0\|0 | 0.26 | 0.79 | 0.26 | 0.79 | 0.26 | −3.21 | 6.67 | 0.47 |
| P21266 | GSTM3 | 0\|0\|2 | 2 | 0.67 | 0\|0\|0 | 0.26 | 0.79 | 0.26 | 0.79 | 0.26 | −3.21 | 6.67 | 0.47 |
| O60884 | DNAJA2 | 2\|4\|3 | 9 | 3 | 0\|0\|2 | 0.25 | 0.41 | 0.25 | 0.41 | 0.25 | −2.03 | 4.5 | 0.62 |
| O95373 | IPO7 | 3\|4\|2 | 9 | 3 | 0\|0\|2 | 0.25 | 0.41 | 0.25 | 0.41 | 0.25 | −2.03 | 4.5 | 0.62 |
| P38606-2 | ATP6VIA | 4\|3\|2 | 9 | 3 | 2\|0\|0 | 0.25 | 0.41 | 0.25 | 0.41 | 0.25 | −2.03 | 4.5 | 0.62 |
| Q9P0U3-2 | SENP1 | 0\|5\|2 | 7 | 2.33 | 2\|0\|0 | 0.24 | 0.59 | 0.24 | 0.59 | 0.24 | −5.38 | 3.5 | 0.62 |
| Q15650 | TRIP4 | 0\|4\|3 | 7 | 2.33 | 2\|0\|0 | 0.22 | 0.41 | 0.22 | 0.41 | 0.22 | −5.38 | 3.5 | 0.62 |
| Q9HB19 | PLEKHA2 | 3\|5\|3 | 11 | 3.67 | 0\|0\|3 | 0.21 | 0.35 | 0.21 | 0.35 | 0.21 | −1.84 | 3.67 | 0.62 |
| Q8N6T3 | ARFGAP1 | 2\|3\|10 | 15 | 5 | 0\|3\|4 | 0.21 | 0.63 | 0.21 | 0.63 | 0.21 | −7.93 | 2.14 | 0.62 |
| Q6IQ22 | RAB12 | 4\|5\|5 | 14 | 4.67 | 4\|0\|0 | 0.21 | 0.25 | 0.21 | 0.25 | 0.21 | −1.76 | 3.5 | 0.62 |
| Q6N021 | TET2 | 0\|7\|2 | 9 | 3 | 0\|3\|0 | 0.21 | 0.58 | 0.21 | 0.58 | 0.21 | −5.8 | 3 | 0.62 |
| O95604 | HLA-C | 4\|3\|4 | 11 | 3.67 | 0\|3\|0 | 0.21 | 0.25 | 0.21 | 0.25 | 0.21 | −1.84 | 3.67 | 0.62 |
| P25789 | PSMA4 | 3\|3\|2 | 8 | 2.67 | 0\|0\|2 | 0.2 | 0.24 | 0.2 | 0.24 | 0.2 | −2.03 | 4 | 0.63 |
| P55735-2 | SEC13 | 5\|0\|0 | 5 | 1.67 | 0\|0\|2 | 0.2 | 0.59 | 0.2 | 0.59 | 0.2 | −5.38 | 2.5 | 0.62 |
| Q04206-2 | RELA | 7\|3\|2 | 12 | 4 | 3\|2\|0 | 0.19 | 0.56 | 0.19 | 0.56 | 0.19 | −5.66 | 2.4 | 0.63 |
| Q02413 | DSG1 | 4\|2\|0 | 6 | 2 | 0\|2\|0 | 0.17 | 0.41 | 0.17 | 0.41 | 0.17 | −5.38 | 3 | 0.63 |
| P35222 | CTNNB1 | 4\|0\|2 | 6 | 2 | 0\|2\|0 | 0.17 | 0.41 | 0.17 | 0.41 | 0.17 | −5.38 | 3 | 0.63 |
| Q13330-2 | MTA1 | 016\|5 | 11 | 3.67 | 2\|0\|3 | 0.16 | 0.33 | 0.16 | 0.33 | 0.16 | −9.13 | 2.2 | 0.63 |
| Q9Y2P8 | RCL1 | 2\|3\|2 | 7 | 2.33 | 2\|0\|0 | 0.16 | 0.24 | 0.16 | 0.24 | 0.16 | −2.03 | 3.5 | 0.63 |
| P02452 | COL1A1 | 2\|2\|3 | 7 | 2.33 | 0\|2\|0 | 0.16 | 0.24 | 0.16 | 0.24 | 0.16 | −2.03 | 3.5 | 0.63 |
| Q8NC60 | NOA1 | 0\|5\|0 | 5 | 1.67 | 2\|2\|0 | 0.15 | 0.46 | 0.15 | 0.46 | 0.15 | −7.8 | 1.25 | 0.63 |
| Q8ND04 | SMG8 | 2\|3\|4 | 9 | 3 | 0\|0\|3 | 0.15 | 0.25 | 0.15 | 0.25 | 0.15 | −2.88 | 3 | 0.63 |
| Q9UNL2 | SSR3 | 3\|3\|3 | 9 | 3 | 3\|0\|0 | 0.14 | 0.14 | 0.14 | 0.14 | 0.14 | −1.84 | 3 | 0.63 |
| P50750 | CDK9 | 3\|3\|3 | 9 | 3 | 0\|3\|0 | 0.14 | 0.14 | 0.14 | 0.14 | 0.14 | −1.84 | 3 | 0.63 |
| Q9H9Y6-5 | POLR18 | 3\|5\|3 | 11 | 3.67 | 4\|0\|0 | 0.13 | 0.25 | 0.13 | 0.25 | 0.13 | −2.65 | 2.75 | 0.64 |
| P99999 | CYCS | 2\|2\|2 | 6 | 2 | 0\|2\|0 | 0.12 | 0.12 | 0.12 | 0.12 | 0.12 | −2.03 | 3 | 0.65 |
| Q9H425 | C1ORF198 | 2\|3\|0 | 5 | 1.67 | 0\|0\|2 | 0.12 | 0.24 | 0.12 | 0.24 | 0.12 | −5.38 | 2.5 | 0.64 |
| O60942 | RNGTT | 3\|2\|0 | 5 | 1.67 | 0\|0\|2 | 0.12 | 0.24 | 0.12 | 0.24 | 0.12 | −5.38 | 2.5 | 0.64 |
| Q9UKK3 | PARP4 | 0\|2\|3 | 5 | 1.67 | 0\|0\|2 | 0.12 | 0.24 | 0.12 | 0.24 | 0.1 | −5.38 | 2.5 | 0.64 |
| P78318 | IGBP1 | 2\|2\|2 | 6 | 2 | 0\|0\|2 | 0.12 | 0.12 | 0.12 | 0.12 | 0.12 | −2.03 | 3 | 0.65 |
| Q00653-4 | NFKB2 | 4\|4\|3 | 11 | 3.67 | 0\|4\|0 | 0.12 | 0.15 | 0.12 | 0.15 | 0.12 | −2.65 | 2.75 | 0.64 |
| P08240 | SRPRA | 0\|3\|2 | 5 | 1.67 | 2\|0\|0 | 0.12 | 0.24 | 0.12 | 0.24 | 0.12 | −5.38 | 2.5 | 0.64 |
| Q9C0C9 | UBE20 | 3\|0\|2 | 5 | 1.67 | 0\|2\|0 | 0.12 | 0.24 | 0.12 | 0.24 | 0.12 | −5.38 | 2.5 | 0.64 |
| P49674 | CSNK1E | 2\|2\|2 | 6 | 2 | 0\|2\|0 | 0.1 | 0.12 | 0.12 | 0.12 | 0.12 | −2.03 | 3 | 0.65 |
| Q12905 | ILF2 | 2\|2\|4 | 8 | 2.67 | 0\|3\|0 | 0.12 | 0.25 | 0.12 | 0.25 | 0.12 | −2.88 | 2.67 | 0.64 |
| O60568 | PLOD3 | 3\|0\|2 | 5 | 1.67 | 2\|0\|0 | 0.12 | 0.24 | 0.12 | 0.24 | 0.12 | −5.38 | 2.5 | 0.64 |
| Q86TG7 | PEG10 | 8\|11\|11 | 30 | 10 | 5\|5\|2 | 0.11 | 0.17 | 0.11 | 0.17 | 0.11 | −5.47 | 2.5 | 0.65 |
| Q15031 | LARS2 | 5\|2\|3 | 10 | 3.33 | 4\|0\|0 | 0.11 | 0.25 | 0.11 | 0.25 | 0.11 | −3.87 | 2.5 | 0.65 |
| Q9BYJ9 | YTHDF1 | 2\|4\|0 | 6 | 2 | 3\|0\|0 | 0.1 | 0.25 | 0.1 | 0.25 | 0.1 | −5.8 | 2 | 0.65 |
| P78406 | RAE1 | 0\|5\|3 | 8 | 2.67 | 4\|0\|0 | 0.1 | 0.25 | 0.1 | 0.25 | 0.1 | −7.28 | 2 | 0.65 |
| Q14432 | PDE3A | 7\|9\|2 | 18 | 6 | 2\|3\|4 | 0.1 | 0.28 | 0.1 | 0.28 | 0.1 | −10.42 | 2 | 0.65 |
| Q9UNY4 | TTF2 | 5\|3\|8 | 16 | 5.33 | 3\|4\|0 | 0.1 | 0.28 | 0.1 | 0.28 | 0.1 | −6.41 | 2.29 | 0.65 |
| O00399 | DCTN6 | 2\|0\|2 | 4 | 1.33 | 0\|0\|2 | 0.08 | 0.12 | 0.08 | 0.12 | 0.08 | −5.38 | 2 | 0.67 |
| Q96CS3 | FAF2 | 8\|3\|4 | 15 | 5 | 3\|2\|3 | 0.08 | 0.24 | 0.08 | 0.24 | 0.08 | −7.81 | 1.88 | 0.66 |
| Q15165-3 | PON2 | 2\|0\|2 | 4 | 1.33 | 0\|0\|2 | 0.08 | 0.12 | 0.08 | 0.12 | 0.08 | −5.38 | 2 | 0.67 |
| O8WYA6-4 | CTNNBL1 | 0\|2\|2 | 4 | 1.33 | 0\|0\|2 | 0.08 | 0.12 | 0.08 | 0.12 | 0.08 | −5.38 | 2 | 0.67 |
| Q15776 | ZKSCAN8 | 2\|2\|0 | 4 | 1.33 | 0\|0\|2 | 0.08 | 0.12 | 0.08 | 0.12 | 0.08 | −5.38 | 2 | 0.67 |
| P61604 | HSPE3 | 2\|2\|0 | 4 | 1.33 | 0\|0\|2 | 0.08 | 0.12 | 0.08 | 0.12 | 0.08 | −5.38 | 2 | 0.67 |
| Q8TC12 | STT3B | 0\|3\|0 | 3 | 1 | 0\|0\|2 | 0.08 | 0.24 | 0.08 | 0.24 | 0.08 | −5.38 | 1.5 | 0.66 |
| P62633-2 | CNBP | 0\|0\|4 | 4 | 1.33 | 3\|0\|0 | 0.08 | 0.25 | 0.08 | 0.25 | 0.08 | −5.8 | 1.33 | 0.66 |
| Q9C0D5-2 | TANC1 | 0\|0\|3 | 3 | 1 | 0\|0\|2 | 0.08 | 0.24 | 0.08 | 0.24 | 0.08 | −5.38 | 1.5 | 0.66 |
| O14757-2 | CHEK1 | 2\|0\|2 | 4 | 1.33 | 0\|0\|2 | 0.08 | 0.12 | 0.08 | 0.12 | 0.08 | −5.38 | 2 | 0.67 |
| Q61A86-2 | ELP2 | 0\|2\|2 | 4 | 1.33 | 0\|0\|2 | 0.08 | 0.12 | 0.08 | 0.12 | 0.08 | −5.38 | 2 | 0.67 |
| Q04446 | GBE1 | 0\|2\|2 | 4 | 1.33 | 0\|2\|0 | 0.08 | 0.12 | 0.08 | 0.12 | 0.08 | −5.38 | 2 | 0.67 |
| O00410-2 | IPO5 | 2\|2\|0 | 4 | 1.33 | 0\|2\|0 | 0.08 | 0.12 | 0.08 | 0.12 | 0.08 | −5.38 | 2 | 0.67 |
| P51809-3 | VAMP7 | 2\|0\|2 | 4 | 1.33 | 0\|2\|0 | 0.08 | 0.12 | 0.08 | 0.12 | 0.08 | −5.38 | 2 | 0.67 |
| Q9GZT9-2 | EGLN1 | 0\|3\|0 | 3 | 1 | 0\|0\|2 | 0.08 | 0.24 | 0.08 | 0.24 | 0.08 | −5.38 | 1.5 | 0.66 |
| O60573-2 | EIF4E2 | 0\|0\|3 | 3 | 1 | 2\|0\|0 | 0.08 | 0.24 | 0.08 | 0.24 | 0.08 | −5.38 | 1.5 | 0.66 |
| P49840 | GSK3A | 2\|3\|2 | 7 | 2.33 | 0\|0\|3 | 0.08 | 0.14 | 0.08 | 0.14 | 0.08 | −2.88 | 2.33 | 0.66 |
| P57678 | GEMIN4 | 2\|2\|3 | 7 | 2.33 | 0\|0\|3 | 0.08 | 0.14 | 0.08 | 0.14 | 0.08 | −2.88 | 2.33 | 0.66 |
| Q14847 | LASP1 | 4\|7\|5 | 16 | 5.33 | 2\|2\|3 | 0.08 | 0.21 | 0.08 | 0.21 | 0.08 | −5.22 | 2.29 | 0.67 |
| P49589-3 | CARS | 2\|2\|0 | 4 | 1.33 | 2\|0\|0 | 0.08 | 0.12 | 0.08 | 0.12 | 0.08 | −5.38 | 2 | 0.67 |
| Q9NUL7 | DDX28 | 2\|0\|2 | 4 | 1.33 | 2\|0\|0 | 0.08 | 0.12 | 0.08 | 0.12 | 0.08 | −5.38 | 2 | 0.67 |
| O99575 | POP1 | 0\|2\|2 | 4 | 1.33 | 2\|0\|0 | 0.08 | 0.12 | 0.08 | 0.12 | 0.08 | −5.38 | 2 | 0.67 |
| O75319 | DUSP11 | 0\|3\|0 | 3 | 1 | 0\|2\|0 | 0.08 | 0.24 | 0.08 | 0.24 | 0.08 | −5.38 | 1.5 | 0.66 |
| Q9H6T3-2 | RPAP3 | 3\|0\|0 | 3 | 1 | 2\|0\|0 | 0.08 | 0.24 | 0.08 | 0.24 | 0.08 | −5.38 | 1.5 | 0.66 |
| O43847 | NRDC | 0\|0\|5 | 5 | 1.67 | 0\|4\|0 | 0.08 | 0.25 | 0.08 | 0.25 | 0.08 | −7.28 | 1.25 | 0.66 |
| P08134 | RHOC | 2\|0\|2 | 4 | 1.33 | 0\|0\|2 | 0.08 | 0.12 | 0.08 | 0.12 | 0.08 | −5.38 | 2 | 0.67 |
| Q9UK76 | JPT1 | 0\|3\|0 | 3 | 1 | 2\|0\|0 | 0.08 | 0.24 | 0.08 | 0.24 | 0.08 | −5.38 | 1.5 | 0.66 |
| P86791 | CCZ1 | 2\|2\|0 | 4 | 1.33 | 2\|0\|0 | 0.08 | 0.12 | 0.08 | 0.12 | 0.08 | −5.38 | 2 | 0.67 |
| A8CG34 | POM121C | 2\|2\|0 | 4 | 1.33 | 0\|0\|2 | 0.08 | 0.12 | 0.08 | 0.12 | 0.08 | −5.38 | 2 | 0.67 |
| Q9BZV1-2 | UBXN6 | 0\|2\|2 | 4 | 1.33 | 0\|0\|2 | 0.08 | 0.12 | 0.08 | 0.12 | 0.08 | −5.38 | 2 | 0.67 |
| O75530-3 | EED | 0\|2\|2 | 4 | 1.33 | 2\|0\|0 | 0.08 | 0.12 | 0.08 | 0.12 | 0.08 | −5.38 | 2 | 0.67 |
| Q8NEZS | FBXO22 | 2\|0\|2 | 4 | 1.33 | 2\|0\|0 | 0.08 | 0.12 | 0.08 | 0.12 | 0.08 | −5.38 | 2 | 0.67 |
| Q93008-1 | USP9X | 2\|2\|0 | 4 | 1.33 | 0\|0\|2 | 0.08 | 0.12 | 0.08 | 0.12 | 0.08 | −5.38 | 2 | 0.67 |
| P51692 | STAT5B | 2\|2\|0 | 4 | 1.33 | 0\|0\|2 | 0.08 | 0.12 | 0.08 | 0.12 | 0.08 | −5.38 | 2 | 0.67 |
| O95861-4 | BPNT1 | 2\|2\|0 | 4 | 1.33 | 2\|0\|0 | 0.08 | 0.12 | 0.08 | 0.12 | 0.08 | −5.38 | 2 | 0.67 |
| Q9H583 | HEATR1 | 0\|0\|3 | 3 | 1 | 0\|0\|2 | 0.08 | 0.24 | 0.08 | 0.24 | 0.08 | −5.38 | 1.5 | 0.66 |
| Q9BVS4 | RIOK2 | 0\|2\|2 | 0 | 1.33 | 0\|2\|0 | 0.08 | 0.12 | 0.08 | 0.12 | 0.08 | −5.38 | 2 | 0.67 |
| Q13283 | G3BP1 | 7\|5\|5 | 17 | 5.67 | 2\|3\|2 | 0.08 | 0.21 | 0.08 | 0.21 | 0.08 | −3.87 | 2.43 | 0.66 |
| O00159-2 | MYO1C | 0\|3\|0 | 3 | 1 | 2\|0\|0 | 0.08 | 0.24 | 0.08 | 0.24 | 0.08 | −5.38 | 1.5 | 0.66 |
| O14744-4 | PRMTS | 0\|3\|0 | 3 | 3 | 2\|0\|0 | 0.08 | 0.24 | 0.08 | 0.24 | 0.08 | −5.38 | 1.5 | 0.66 |
| Q9H4A4 | RNPEP | 2\|2\|0 | 4 | 1.33 | 0\|0\|2 | 0.08 | 0.12 | 0.08 | 0.12 | 0.08 | −5.38 | 2 | 0.67 |
| Q8NEC7-3 | GSTCD | 2\|0\|2 | 4 | 1.33 | 2\|0\|0 | 0.08 | 0.12 | 0.08 | 0.12 | 0.08 | −5.38 | 2 | 0.67 |
| P00492 | HPRT1 | 2\|0\|2 | 4 | 1.33 | 2\|0\|0 | 0.08 | 0.12 | 0.08 | 0.12 | 0.08 | −5.38 | 2 | 0.67 |
| P43487-2 | RANBP1 | 2\|0\|2 | 4 | 1.33 | 0\|2\|0 | 0.08 | 0.12 | 0.08 | 0.12 | 0.08 | −5.38 | 2 | 0.67 |
| Q9Y2X3 | NOP58 | 2\|2\|0 | 0 | 1.33 | 0\|0\|2 | 0.08 | 0.12 | 0.08 | 0.12 | 0.08 | −5.38 | 2 | 0.67 |
| A1L0T0 | ILVBL | 3\|4\|3 | 10 | 3.33 | 2\|0\|2 | 0.08 | 0.15 | 0.08 | 0.15 | 0.08 | −3.21 | 2.5 | 0.67 |
| P27105 | STOM | 3\|0\|0 | 3 | 1 | 0\|0\|2 | 0.08 | 0.24 | 0.08 | 0.24 | 0.08 | −5.38 | 1.5 | 0.66 |
| O00178 | GTPBP1 | 4\|5\|3 | 12 | 4 | 2\|3\|0 | 0.07 | 0.14 | 0.07 | 0.14 | 0.07 | −4.25 | 2.4 | 0.7 |
| P30086 | PEBP1 | 3\|5\|4 | 12 | 4 | 0\|2\|3 | 0.07 | 0.14 | 0.07 | 0.14 | 0.07 | −4.25 | 2.4 | 0.7 |
| Q9H0S4 | DDX47 | 2\|3\|0 | 5 | 1.67 | 0\|3\|0 | 0.06 | 0.14 | 0.06 | 0.14 | 0.06 | −5.8 | 1.67 | 0.7 |
| Q9NVP1 | DDX18 | 2\|0\|3 | 5 | 1.67 | 0\|0\|3 | 0.06 | 0.14 | 0.06 | 0.14 | 0.06 | −5.8 | 1.67 | 0.7 |
| Q9Y262 | EIF3L | 2\|3\|0 | 5 | 1.67 | 0\|3\|0 | 0.06 | 0.14 | 0.06 | 0.14 | 0.06 | −5.8 | 1.67 | 0.7 |
| Q5GLZ8-6 | HERC4 | 2\|4\|2 | 8 | 2.67 | 0\|2\|2 | 0.06 | 0.15 | 0.06 | 0.15 | 0.06 | −4.67 | 2 | 0.7 |
| Q14558 | PRPSAP1 | 2\|4\|2 | 8 | 2.67 | 2\|0\|2 | 0.06 | 0.15 | 0.06 | 0.15 | 0.06 | −4.67 | 2 | 0.7 |
| Q12792-4 | TWF1 | 3\|0\|2 | 5 | 1.67 | 3\|0\|0 | 0.06 | 0.14 | 0.06 | 0.14 | 0.06 | −5.8 | 1.67 | 0.7 |
| Q8NFQ8 | TORLAIP2 | 2\|2\|2 | 6 | 2 | 0\|3\|0 | 0.05 | 0.05 | 0.05 | 0.05 | 0.05 | −2.88 | 2 | 0.71 |
| P61619 | SEC61A1 | 5\|3\|2 | 10 | 3.33 | 0\|2\|3 | 0.05 | 0.14 | 0.05 | 0.14 | 0.05 | −5.66 | 2 | 0.71 |
| Q5SRE5 | NUP188 | 4\|4\|4 | 12 | 4 | 0\|2\|3 | 0.05 | 0.05 | 0.05 | 0.05 | 0.05 | −2.97 | 2.4 | 0.71 |
| O14976-2 | GAK | 4\|4\|4 | 12 | 4 | 3\|0\|2 | 0.05 | 0.05 | 0.05 | 0.05 | 0.05 | −2.97 | 2.4 | 0.71 |
| Q9H6S0 | YTHDC2 | 4\|0\|0 | 4 | 1.33 | 2\|0\|2 | 0.05 | 0.15 | 0.05 | 0.15 | 0.05 | −7.8 | 1 | 0.71 |
| P01116-2 | KRAS | 3\|3\|2 | 8 | 2.67 | 0\|0\|4 | 0.05 | 0.07 | 0.05 | 0.07 | 0.05 | −3.87 | 2 | 0.71 |
| P61964 | WDRS | 2\|4\|0 | 6 | 2 | 0\|2\|2 | 0.05 | 0.15 | 0.05 | 0.15 | 0.05 | −7.8 | 1.5 | 0.71 |
| P82930 | MRPS34 | 0\|0\|3 | 3 | 3 | 3\|0\|0 | 0.05 | 0.14 | 0.05 | 0.14 | 0.05 | −5.8 | 1 | 0.72 |
| O75330-2 | HMMR | 5\|0\|0 | 5 | 1.67 | 2\|3\|0 | 0.05 | 0.14 | 0.05 | 0.14 | 0.05 | −9.13 | 1 | 0.72 |
| O95376 | ARIH2 | 0\|3\|0 | 3 | 1 | 3\|0\|0 | 0.05 | 0.14 | 0.05 | 0.14 | 0.05 | −5.8 | 1 | 0.72 |
| Q9Y3B2 | EXOSC1 | 5\|2\|2 | 9 | 3 | 3\|2\|0 | 0.05 | 0.14 | 0.05 | 0.14 | 0.05 | −5.66 | 1.8 | 0.71 |
| Q9NQH7-2 | XPNPEP3 | 0\|0\|3 | 3 | 1 | 0\|0\|3 | 0.05 | 0.14 | 0.05 | 0.14 | 0.05 | −5.8 | 1 | 0.72 |
| Q969N2-4 | PIGT | 2\|4\|0 | 6 | 2 | 0\|2\|2 | 0.05 | 0.15 | 0.05 | 0.15 | 0.05 | −7.8 | 1.5 | 0.71 |
| Q9Y5K5-2 | UCHLS | 3\|0\|0 | 3 | 3 | 3\|0\|0 | 0.05 | 0.14 | 0.05 | 0.14 | 0.05 | −5.8 | 1 | 0.72 |
| O99570 | PIK3R4 | 0\|2\|4 | 6 | 2 | 0\|2\|2 | 0.05 | 0.15 | 0.05 | 0.15 | 0.05 | −7.8 | 1.5 | 0.71 |
| Q9NWT8 | AURKAIP1 | 3\|0\|0 | 3 | 3 | 3\|0\|0 | 0.05 | 0.14 | 0.05 | 0.14 | 0.05 | −5.8 | 1 | 0.72 |
| Q92598-2 | HSPH1 | 5\|2\|2 | 9 | 3 | 0\|5\|0 | 0.05 | 0.15 | 0.05 | 0.15 | 0.05 | −4.96 | 1.8 | 0.71 |
| Q50862 | FLG2 | 4\|0\|0 | 4 | 1.33 | 0\|4\|0 | 0.05 | 0.15 | 0.05 | 0.15 | 0.05 | −7.28 | 1 | 0.71 |
| Q92536 | SLC7A6 | 4\|0\|0 | 4 | 1.33 | 0\|0\|4 | 0.05 | 0.15 | 0.05 | 0.15 | 0.05 | −7.28 | 1 | 0.71 |
| Q9NR50-3 | EIF283 | 5\|4\|10 | 19 | 6.33 | 4\|3\|4 | 0.05 | 0.14 | 0.05 | 0.14 | 0.05 | −9.88 | 1.73 | 0.72 |
| P49023-2 | PXN | 0\|0\|2 | 2 | 0.67 | 0\|0\|2 | 0.04 | 0.12 | 0.04 | 0.12 | 0.04 | −5.38 | 1 | 0.72 |
| Q96HA1 | POM121 | 2\|2\|0 | 4 | 1.33 | 0\|0\|3 | 0.04 | 0.05 | 0.04 | 0.05 | 0.04 | −5.8 | 1.33 | 0.75 |
| O75165 | DNAIC13 | 0\|2\|0 | 2 | 0.67 | 0\|2\|0 | 0.04 | 0.12 | 0.04 | 0.12 | 0.04 | −5.38 | 3 | 0.72 |
| P61163 | ACTRIA | 2\|0\|0 | 2 | 0.6 | 0\|0\|2 | 0.04 | 0.12 | 0.04 | 0.12 | 0.04 | −5.38 | 1 | 0.72 |
| Q9Y2T2 | AP3M1 | 0\|2\|0 | 2 | 0.67 | 0\|0\|2 | 0.04 | 0.12 | 0.04 | 0.12 | 0.04 | −5.38 | 3 | 0.72 |
| O15460-2 | P4HA2 | 0\|2\|2 | 4 | 1.33 | 0\|3\|0 | 0.04 | 0.05 | 0.04 | 0.05 | 0.04 | −5.8 | 1.33 | 0.75 |
| Q86TB9-4 | PATL1 | 2\|0\|2 | 4 | 1.33 | 0\|0\|3 | 0.04 | 0.05 | 0.04 | 0.05 | 0.04 | −5.8 | 1.33 | 0.75 |
| Q8IZT6-2 | ASPM | 0\|2\|0 | 2 | 0.67 | 0\|0\|2 | 0.04 | 0.12 | 0.04 | 0.12 | 0.04 | −5.38 | 3 | 0.72 |
| Q7Z2E3-7 | APTX | 2\|2\|0 | 4 | 1.33 | 3\|0\|0 | 0.04 | 0.05 | 0.04 | 0.05 | 0.04 | −5.8 | 1.33 | 0.75 |
| Q16643 | DBN1 | 2\|0\|0 | 2 | 0.67 | 2\|0\|0 | 0.04 | 0.12 | 0.04 | 0.12 | 0.04 | −5.38 | 1 | 0.72 |
| Q92879-2 | CELF1 | 0\|2\|2 | 4 | 1.33 | 3\|0\|0 | 0.04 | 0.05 | 0.04 | 0.05 | 0.04 | −5.8 | 1.33 | 0.75 |
| QST1M5 | FKBP15 | 0\|2\|0 | 2 | 0.67 | 0\|2\|0 | 0.04 | 0.12 | 0.04 | 0.12 | 0.04 | −5.38 | 1 | 0.72 |
| O15504 | NUPL2 | 0\|2\|0 | 2 | 0.67 | 2\|0\|0 | 0.04 | 0.12 | 0.04 | 0.12 | 0.04 | −5.38 | 1 | 0.72 |
| A0FGR8-2 | ESYT2 | 0\|2\|0 | 2 | 0.67 | 0\|0\|2 | 0.04 | 0.12 | 0.04 | 0.12 | 0.04 | −5.38 | 3 | 0.72 |
| O14530-2 | TXNDC9 | 0\|0\|2 | 2 | 0.67 | 0\|0\|2 | 0.04 | 0.12 | 0.04 | 0.12 | 0.04 | −5.38 | 1 | 0.72 |
| Q13625-2 | TP53BP2 | 0\|2\|0 | 2 | 0.67 | 2\|0\|0 | 0.04 | 0.12 | 0.04 | 0.12 | 0.04 | −5.38 | 3 | 0.72 |
| P25786 | PSMA1 | 5\|4\|5 | 14 | 4.67 | 3\|3\|0 | 0.04 | 0.06 | 0.04 | 0.06 | 0.04 | −4.04 | 2.33 | 0.72 |
| Q13769 | THOCS | 2\|0\|2 | 4 | 1.33 | 0\|3\|0 | 0.04 | 0.05 | 0.04 | 0.05 | 0.04 | −5.8 | 1.33 | 0.75 |
| P46100-2 | ATRX | 0\|0\|2 | 2 | 0.67 | 0\|2\|0 | 0.04 | 0.12 | 0.04 | 0.12 | 0.04 | −5.38 | 1 | 0.72 |
| Q38726 | TWISTNB | 0\|0\|2 | 2 | 0.67 | 0\|0\|2 | 0.04 | 0.12 | 0.04 | 0.12 | 0.04 | −5.38 | 3 | 0.72 |
| P49821-2 | NDUFV1 | 2\|0\|0 | 2 | 0.67 | 2\|0\|0 | 0.04 | 0.12 | 0.04 | 0.12 | 0.04 | −5.38 | 1 | 0.72 |
| P42694 | HELZ | 0\|2\|2 | 4 | 1.33 | 3\|0\|0 | 0.04 | 0.05 | 0.04 | 0.05 | 0.04 | −5.8 | 1.33 | 0.75 |
| Q8IW45 | NAXD | 2\|0\|0 | 2 | 0.67 | 0\|0\|2 | 0.04 | 0.12 | 0.04 | 0.12 | 0.04 | −5.38 | 1 | 0.72 |
| Q9HCD6 | TANC2 | 2\|0\|0 | 2 | 0.67 | 2\|0\|0 | 0.04 | 0.12 | 0.04 | 0.12 | 0.04 | −5.38 | 1 | 0.72 |
| P46459 | NSF | 2\|0\|0 | 2 | 0.67 | 2\|0\|0 | 0.04 | 0.12 | 0.04 | 0.12 | 0.04 | −5.38 | 1 | 0.72 |
| Q9UJA5 | TRMT6 | 2\|0\|2 | 4 | 1.33 | 3\|0\|0 | 0.04 | 0.05 | 0.04 | 0.05 | 0.04 | −5.8 | 1.33 | 0.75 |
| Q6PKG0-3 | LARP1 | 0\|0\|2 | 2 | 0.67 | 2\|0\|0 | 0.04 | 0.12 | 0.04 | 0.12 | 0.04 | −5.38 | 1 | 0.72 |
| Q96F86 | EDC3 | 2\|2\|0 | 4 | 1.33 | 0\|0\|3 | 0.04 | 0.05 | 0.04 | 0.05 | 0.04 | −5.8 | 1.33 | 0.75 |
| Q9Y2A7 | NCKAP1 | 0\|2\|0 | 2 | 0.67 | 0\|2\|0 | 0.04 | 0.12 | 0.04 | 0.12 | 0.04 | −5.38 | 1 | 0.72 |
| Q15018 | ABRAXAS2 | 3\|3\|3 | 9 | 3 | 2\|2\|0 | 0.04 | 0.04 | 0.04 | 0.04 | 0.04 | −3.21 | 2.25 | 0.72 |
| Q15555-4 | MAPRE2 | 2\|0\|0 | 2 | 0.67 | 0\|0\|2 | 0.04 | 0.12 | 0.04 | 0.12 | 0.04 | −5.38 | 1 | 0.72 |
| P51553 | IDH3G | 3\|3\|3 | 9 | 3 | 2\|2\|0 | 0.04 | 0.04 | 0.04 | 0.04 | 0.04 | −3.21 | 2.25 | 0.72 |
| P60660 | MYL6 | 0\|2\|0 | 2 | 0.67 | 2\|0\|0 | 0.04 | 0.12 | 0.04 | 0.12 | 0.04 | −5.38 | 1 | 0.72 |
| O15084 | ANKRD28 | 0\|2\|0 | 2 | 0.67 | 2\|0\|0 | 0.04 | 0.12 | 0.04 | 0.12 | 0.04 | −5.38 | 1 | 0.72 |
| Q9NX63 | CHCHD3 | 0\|0\|2 | 2 | 0.67 | 0\|2\|0 | 0.04 | 0.12 | 0.04 | 0.12 | 0.04 | −5.38 | 3 | 0.72 |
| P62316 | SNRPD2 | 2\|0\|2 | 4 | 1.33 | 3\|0\|0 | 0.04 | 0.05 | 0.04 | 0.05 | 0.04 | −5.8 | 1.33 | 0.75 |
| Q8N0X7 | SPG20 | 0\|2\|2 | 4 | 1.33 | 0\|0\|3 | 0.04 | 0.05 | 0.04 | 0.05 | 0.04 | −5.8 | 1.33 | 0.75 |
| P12268 | IMPDH2 | 0\|0\|2 | 2 | 0.67 | 2\|0\|0 | 0.04 | 0.12 | 0.04 | 0.12 | 0.04 | −5.38 | 1 | 0.72 |
| P30260 | CDC27 | 0\|2\|0 | 2 | 0.67 | 0\|0\|2 | 0.04 | 0.12 | 0.04 | 0.12 | 0.04 | −5.38 | 1 | 0.72 |
| Q14643-4 | ITPR1 | 0\|2\|2 | 4 | 1.33 | 3\|0\|0 | 0.04 | 0.05 | 0.04 | 0.05 | 0.04 | −5.8 | 1.33 | 0.75 |
| O8NBM4 | UBAC2 | 2\|0\|0 | 2 | 0.67 | 2\|0\|0 | 0.04 | 0.12 | 0.04 | 0.12 | 0.04 | −5.38 | 1 | 0.72 |
| O60333-3 | KIF1B | 0\|0\|2 | 2 | 0.67 | 0\|0\|2 | 0.04 | 0.12 | 0.04 | 0.12 | 0.04 | −5.38 | 1 | 0.72 |
| Q86WB0 | ZC3HC1 | 0\|0\|2 | 2 | 0.67 | 0\|0\|2 | 0.04 | 0.12 | 0.04 | 0.12 | 0.04 | −5.38 | 1 | 0.72 |
| O15305 | PMM2 | 0\|2\|0 | 2 | 0.67 | 0\|0\|2 | 0.04 | 0.12 | 0.04 | 0.12 | 0.04 | −5.38 | 1 | 0.72 |
| P41236 | PPP1R2 | 2\|0\|0 | 2 | 0.67 | 0\|2\|0 | 0.04 | 0.12 | 0.04 | 0.12 | 0.04 | −5.38 | 1 | 0.72 |
| Q9BVC4-4 | MLST8 | 0\|2\|0 | 2 | 0.67 | 0\|0\|2 | 0.04 | 0.12 | 0.04 | 0.12 | 0.04 | −5.38 | 1 | 0.72 |
| P53007 | SLC25A1 | 0\|2\|0 | 2 | 0.67 | 0\|0\|2 | 0.04 | 0.12 | 0.04 | 0.12 | 0.04 | −5.38 | 1 | 0.72 |
| QSTCZ1-3 | SH3PXD2A | 0\|0\|2 | 2 | 0.67 | 0\|0\|2 | 0.04 | 0.12 | 0.04 | 0.12 | 0.04 | −5.38 | 3 | 0.72 |
| O15460 | P4HA2 | 0\|2\|0 | 2 | 0.67 | 0\|2\|0 | 0.04 | 0.12 | 0.04 | 0.12 | 0.04 | −5.38 | 1 | 0.72 |
| Q9BZE1 | MRPL37 | 2\|0\|3 | 5 | 1.67 | 4\|0\|0 | 0.03 | 0.07 | 0.03 | 0.07 | 0.03 | −7.28 | 1.25 | 0.76 |
| Q9H078-4 | CLPB | 3\|2\|3 | 8 | 2.67 | 2\|0\|2 | 0.03 | 0.04 | 0.03 | 0.04 | 0.03 | −4.67 | 2 | 0.75 |
| P61160 | ACTR2 | 2\|4\|0 | 6 | 2 | 5\|0\|0 | 0.03 | 0.07 | 0.03 | 0.07 | 0.03 | −8.76 | 1.2 | 0.76 |
| P61224-3 | RAP1B | 3\|4\|3 | 10 | 3.33 | 0\|2\|3 | 0.03 | 0.05 | 0.03 | 0.05 | 0.03 | −4.25 | 2 | 0.76 |
| QST7N3 | KANK4 | 4\|4\|2 | 10 | 3.33 | 0\|2\|3 | 0.03 | 0.05 | 0.03 | 0.05 | 0.03 | −5.66 | 2 | 0.75 |
| Q8NFH4 | NUP37 | 3\|4\|5 | 12 | 4 | 0\|3\|3 | 0.03 | 0.06 | 0.03 | 0.06 | 0.03 | −5.36 | 2 | 0.76 |
| Q86X95-2 | CIR1 | 2\|3\|3 | 8 | 2.67 | 0\|2\|2 | 0.03 | 0.04 | 0.03 | 0.04 | 0.03 | −4.67 | 2 | 0.75 |
| Q81YB8 | SUPV3L1 | 4\|3\|3 | 10 | 3.33 | 3\|0\|2 | 0.03 | 0.05 | 0.03 | 0.05 | 0.03 | −4.25 | 2 | 0.76 |
| P78346 | RPP30 | 2\|2\|4 | 8 | 2.67 | 0\|3\|2 | 0.02 | 0.05 | 0.02 | 0.05 | 0.02 | −5.66 | 1.6 | 0.76 |
| Q16775-2 | HAGH | 0\|0\|2 | 2 | 0.67 | 0\|0\|3 | 0.02 | 0.05 | 0.02 | 0.05 | 0.02 | −5.8 | 0.67 | 0.76 |
| Q9UGP4 | LIMD1 | 2\|0\|3 | 5 | 1.67 | 0\|2\|2 | 0.02 | 0.04 | 0.02 | 0.04 | 0.02 | −7.8 | 1.25 | 0.77 |
| Q13347 | EIF31 | 2\|0\|6 | 8 | 2.67 | 3\|0\|4 | 0.02 | 0.06 | 0.02 | 0.06 | 0.02 | −11.76 | 1.14 | 0.76 |
| Q9H9T3-2 | ELP3 | 0\|0\|2 | 2 | 0.67 | 0\|0\|3 | 0.02 | 0.05 | 0.02 | 0.05 | 0.02 | −5.8 | 0.67 | 0.76 |
| Q9Y320-2 | TMX2 | 0\|2\|3 | 5 | 1.67 | 0\|2\|2 | 0.02 | 0.04 | 0.02 | 0.04 | 0.02 | −7.8 | 1.25 | 0.77 |
| Q9NPI6-2 | DCP1A | 0\|2\|0 | 2 | 0.67 | 3\|0\|0 | 0.02 | 0.05 | 0.02 | 0.05 | 0.02 | −5.8 | 0.67 | 0.76 |
| Q04864-2 | REL | 3\|2\|4 | 9 | 3 | 2\|3\|0 | 0.02 | 0.05 | 0.02 | 0.05 | 0.02 | −5.66 | 1.8 | 0.76 |
| Q15813 | TBCE | 0\|2\|0 | 2 | 0.67 | 0\|3\|0 | 0.02 | 0.05 | 0.02 | 0.05 | 0.02 | −5.8 | 0.67 | 0.76 |
| O43592 | XPOT | 2\|0\|3 | 5 | 1.67 | 0\|2\|2 | 0.02 | 0.04 | 0.02 | 0.04 | 0.02 | −7.8 | 1.25 | 0.77 |
| Q13951 | CBFB | 2\|2\|3 | 7 | 2.33 | 2\|0\|2 | 0.02 | 0.04 | 0.02 | 0.04 | 0.02 | −4.67 | 1.75 | 0.76 |
| Q9BUK6-7 | MSTO1 | 2\|3\|0 | 5 | 1.67 | 2\|2\|0 | 0.02 | 0.04 | 0.02 | 0.04 | 0.02 | −7.8 | 1.25 | 0.77 |
| O60841 | EIF5B | 2\|4\|0 | 6 | 2 | 2\|3\|0 | 0.02 | 0.05 | 0.02 | 0.05 | 0.02 | −9.13 | 1.2 | 0.77 |
| Q9NSV4-7 | DIAPH3 | 2\|0\|3 | 5 | 1.67 | 0\|2\|2 | 0.02 | 0.04 | 0.02 | 0.04 | 0.02 | −7.8 | 1.25 | 0.77 |
| Q13951-2 | CBFB | 2\|2\|3 | 7 | 2.33 | 2\|0\|2 | 0.02 | 0.04 | 0.02 | 0.04 | 0.02 | −4.67 | 1.75 | 0.76 |
| Q5T457-3 | UBR4 | 4\|8\|4 | 16 | 5.33 | 5\|0\|4 | 0.02 | 0.06 | 0.02 | 0.06 | 0.02 | −7.2 | 1.78 | 0.76 |
| Q14195 | DPYSL3 | 0\|2\|0 | 2 | 0.67 | 0\|3\|0 | 0.02 | 0.05 | 0.02 | 0.05 | 0.02 | −5.8 | 0.67 | 0.76 |
| Q8NC51-4 | SERBP1 | 9\|6\|7 | 22 | 7.33 | 4\|3\|4 | 0.02 | 0.04 | 0.02 | 0.04 | 0.02 | −7.05 | 2 | 0.77 |
| Q8IZH2-2 | XRN1 | 2\|4\|2 | 8 | 2.67 | 0\|2\|3 | 0.02 | 0.05 | 0.02 | 0.05 | 0.02 | −5.66 | 1.6 | 0.76 |
| Q9Y223-4 | GNE | 0\|3\|2 | 5 | 1.67 | 2\|0\|2 | 0.02 | 0.04 | 0.02 | 0.04 | 0.02 | −7.8 | 1.25 | 0.77 |
| P12931 | SRC | 2\|0\|3 | 5 | 1.67 | 2\|2\|0 | 0.02 | 0.04 | 0.02 | 0.04 | 0.02 | −7.8 | 1.25 | 0.77 |
| O96900 | RPL36AL | 0\|2\|0 | 2 | 0.67 | 0\|3\|0 | 0.02 | 0.05 | 0.02 | 0.05 | 0.02 | −5.8 | 0.67 | 0.76 |
| Q7KZ17-15 | MARK2 | 8\|10\|7 | 25 | 8.33 | 4\|3\|5 | 0.02 | 0.05 | 0.02 | 0.05 | 0.02 | −6.82 | 2.08 | 0.76 |
| Q49A26-5 | GLYR1 | 3\|2\|0 | 5 | 1.67 | 2\|0\|2 | 0.02 | 0.04 | 0.02 | 0.04 | 0.02 | −7.8 | 1.25 | 0.77 |
| Q96A65 | EXOC4 | 4\|3\|2 | 9 | 3 | 2\|3\|0 | 0.02 | 0.05 | 0.02 | 0.05 | 0.02 | −5.66 | 1.8 | 0.76 |
| P13798 | APEH | 2\|0\|0 | 2 | 0.67 | 3\|0\|0 | 0.02 | 0.05 | 0.02 | 0.05 | 0.02 | −5.8 | 0.67 | 0.76 |
| Q96SK2-3 | TMEM209 | 2\|0\|0 | 2 | 0.67 | 0\|0\|3 | 0.02 | 0.05 | 0.02 | 0.05 | 0.02 | −5.8 | 0.67 | 0.76 |
| P10398 | ARAF | 4\|0\|0 | 4 | 1.33 | 3\|0\|2 | 0.02 | 0.05 | 0.02 | 0.05 | 0.02 | −9.13 | 0.8 | 0.77 |
| O96008 | TOMM40 | 0\|3\|7 | 10 | 3.33 | 2\|6\|0 | 0.02 | 0.06 | 0.02 | 0.06 | 0.02 | −13.01 | 1.25 | 0.76 |
| O60427 | FADS1 | 2\|3\|0 | 5 | 1.67 | 0\|2\|2 | 0.02 | 0.04 | 0.02 | 0.04 | 0.02 | −7.8 | 1.25 | 0.77 |
| Q9H357 | PTPN23 | 0\|3\|2 | 5 | 1.67 | 0\|2\|2 | 0.02 | 0.04 | 0.02 | 0.04 | 0.02 | −7.8 | 1.25 | 0.77 |
| Q14938-6 | NFIX | 3\|0\|2 | 5 | 1.67 | 2\|0\|2 | 0.02 | 0.04 | 0.02 | 0.04 | 0.02 | −7.8 | 1.25 | 0.77 |
| Q9NVV4 | MTPAP | 3\|0\|0 | 3 | 1 | 0\|2\|2 | 0.01 | 0.04 | 0.01 | 0.04 | 0.01 | −7.8 | 0.75 | 0.78 |
| Q8NSF7 | NKAP | 0\|2\|2 | 4 | 1.33 | 0\|4\|0 | 0.01 | 0.02 | 0.01 | 0.02 | 0.01 | −7.28 | 1 | 0.78 |
| Q12834 | CDC20 | 8\|3\|7 | 18 | 6 | 4\|4\|3 | 0.01 | 0.01 | 0.01 | 0.01 | 0.01 | −11.36 | 1.64 | 0.81 |
| O75436 | VPS26A | 2\|3\|3 | 8 | 2.67 | 3\|0\|2 | 0.01 | 0.01 | 0.01 | 0.01 | 0.01 | −5.66 | 1.6 | 0.79 |
| Q9BZE4 | GTPBP4 | 0\|0\|3 | 3 | 1 | 2\|0\|2 | 0.01 | 0.04 | 0.01 | 0.04 | 0.01 | −7.8 | 0.75 | 0.78 |
| Q5TDH0 | DDI2 | 7\|5\|4 | 16 | 5.33 | 5\|2\|2 | 0.01 | 0.03 | 0.01 | 0.03 | 0.01 | −7.54 | 1.78 | 0.79 |
| O60762 | DPM1 | 2\|2\|2 | 6 | 2 | 2\|2\|0 | 0.01 | 0.01 | 0.01 | 0.01 | 0.01 | −4.67 | 1.5 | 0.79 |
| Q8WU90 | ZC3H15 | 2\|0\|3 | 5 | 1.67 | 3\|2\|0 | 0.01 | 0.01 | 0.01 | 0.01 | 0.01 | −9.13 | 1 | 0.81 |
| P50579-2 | METAP2 | 2\|0\|2 | 4 | 1.33 | 2\|0\|2 | 0.01 | 0.01 | 0.01 | 0.01 | 0.01 | −7.8 | 3 | 0.8 |
| Q9BV20 | MRI1 | 3\|2\|4 | 9 | 3 | 3\|0\|3 | 0.01 | 0.02 | 0.01 | 0.02 | 0.01 | −6.82 | 1.5 | 0.8 |
| Q96H79 | ZC3HAV1L | 3\|0\|0 | 3 | 1 | 0\|2\|2 | 0.01 | 0.04 | 0.01 | 0.04 | 0.01 | −7.8 | 0.75 | 0.78 |
| Q53GA4 | PHLDA2 | 2\|2\|2 | 6 | 2 | 2\|2\|0 | 0.01 | 0.01 | 0.01 | 0.01 | 0.01 | −4.67 | 1.5 | 0.79 |
| Q9BSJ8 | ESYT1 | 0\|4\|2 | 6 | 2 | 2\|2\|2 | 0.01 | 0.02 | 0.01 | 0.02 | 0.01 | −10.44 | 1 | 0.81 |
| Q15369-2 | ELOC | 2\|0\|2 | 4 | 1.33 | 2\|2\|0 | 0.01 | 0.01 | 0.01 | 0.01 | 0.01 | −7.8 | 1 | 0.8 |
| Q9H3P7 | ACBD3 | 4\|4\|0 | 8 | 2.67 | 2\|4\|0 | 0.01 | 0.02 | 0.01 | 0.02 | 0.01 | −10.2 | 1.33 | 0.78 |
| Q8N4C8-5 | MINK1 | 4\|0\|6 | 10 | 3.33 | 2\|3\|3 | 0.01 | 0.02 | 0.01 | 0.02 | 0.01 | −13.39 | 1.25 | 0.79 |
| Q7L2H7-2 | EIF3M | 2\|2\|2 | 6 | 2 | 0\|2\|2 | 0.01 | 0.01 | 0.01 | 0.01 | 0.01 | −4.67 | 1.5 | 0.79 |
| 43307 | SSR1 | 0\|0\|3 | 3 | 1 | 0\|2\|2 | 0.01 | 0.04 | 0.01 | 0.04 | 0.01 | −7.8 | 0.75 | 0.78 |
| P29372-5 | MPG | 4\|3\|0 | 7 | 2.33 | 4\|2\|0 | 0.01 | 0.02 | 0.01 | 0.02 | 0.01 | −10.2 | 1.17 | 0.8 |
| O75340 | PDCD6 | 4\|0\|3 | 7 | 2.33 | 2\|2\|2 | 0.01 | 0.02 | 0.01 | 0.02 | 0.01 | −10.44 | 1.17 | 0.8 |
| Q8TB61-3 | SLC35B2 | 2\|0\|2 | 4 | 1.33 | 0\|2\|2 | 0.01 | 0.01 | 0.01 | 0.01 | 0.01 | −7.8 | 1 | 0.8 |
| 29YSQ9 | GTF3C3 | 0\|0\|3 | 3 | 1 | 2\|0\|2 | 0.01 | 0.04 | 0.01 | 0.04 | 0.01 | −7.8 | 0.75 | 0.78 |
| Q7L2J0 | MEPCE | 0\|0\|3 | 3 | 1 | 2\|2\|0 | 0.01 | 0.04 | 0.01 | 0.04 | 0.01 | −7.8 | 0.75 | 0.78 |
| Q5JTZ9 | AARS2 | 4\|3\|2 | 9 | 3 | 2\|2\|2 | 0.01 | 0.02 | 0.01 | 0.02 | 0.01 | −6.91 | 1.5 | 0.8 |
| Q9YSA9-2 | YTHDF2 | 5\|3\|2 | 10 | 3.33 | 3\|2\|2 | 0.01 | 0.02 | 0.01 | 0.02 | 0.01 | −8.1 | 1.43 | 0.8 |
| Q9BTE6 | AARSD1 | 7\|4\|5 | 16 | 5.33 | 2\|3\|4 | 0.01 | 0.03 | 0.01 | 0.03 | 0.01 | −7.54 | 1.78 | 0.79 |
| Q9Y653-5 | ADGRG1 | 3\|0\|0 | 3 | 1 | 0\|2\|2 | 0.01 | 0.04 | 0.01 | 0.04 | 0.01 | −7.8 | 0.75 | 0.78 |
| Q7L5Y9-3 | MAEA | 3\|3\|3 | 9 | 3 | 2\|0\|3 | 0.01 | 0.01 | 0.01 | 0.01 | 0.01 | −4.25 | 1.8 | 0.78 |
| Q9GZR7 | DDX24 | 3\|2\|7 | 12 | 4 | 3\|2\|4 | 0.01 | 0.03 | 0.01 | 0.03 | 0.01 | −10.42 | 1.33 | 0.79 |
| P67809 | YBX3 | 7\|7\|7 | 21 | 7 | 4\|2\|4 | 0.01 | 0.01 | 0.01 | 0.01 | 0.01 | −4.57 | 2.1 | 0.79 |
| P25787 | PSMA2 | 2\|0\|2 | 4 | 1.33 | 0\|2\|2 | 0.01 | 0.01 | 0.01 | 0.01 | 0.01 | −7.8 | 1 | 0.8 |
| Q96U6 | GMPPA | 2\|2\|2 | 6 | 2 | 0\|2\|2 | 0.01 | 0.01 | 0.01 | 0.01 | 0.01 | −4.67 | 1.5 | 0.79 |
| Q9H2M9 | RAB3GAP2 | 2\|0\|2 | 4 | 1.33 | 2\|0\|2 | 0.01 | 0.01 | 0.01 | 0.01 | 0.01 | −7.8 | 1 | 0.8 |
| Q9HOU3 | MAGT1 | 2\|2\|0 | 4 | 1.33 | 2\|0\|2 | 0.01 | 0.01 | 0.01 | 0.01 | 0.01 | −7.8 | 1 | 0.8 |
| Q96EY5 | MVB12A | 2\|3\|3 | 8 | 2.67 | 0\|2\|3 | 0.01 | 0.01 | 0.01 | 0.01 | 0.01 | −5.66 | 1.6 | 0.79 |
| O95831-3 | AIFM1 | 2\|2\|3 | 7 | 2.33 | 2\|0\|3 | 0.01 | 0.01 | 0.01 | 0.01 | 0.01 | −5.66 | 1.4 | 0.8 |
| Q9UJZ1-2 | STOML2 | 0\|3\|0 | 3 | 1 | 2\|0\|2 | 0.01 | 0.04 | 0.01 | 0.04 | 0.01 | −7.8 | 0.75 | 0.78 |
| Q8N556 | AFAP1 | 2\|3\|3 | 8 | 2.67 | 3\|2\|0 | 0.01 | 0.01 | 0.01 | 0.01 | 0.01 | 5.66 | 1.6 | 0.79 |
| Q12788 | TBL3 | 7\|8\|8 | 23 | 7.67 | 3\|3\|5 | 0.01 | 0.01 | 0.01 | 0.01 | 0.01 | −5.69 | 2.09 | 0.79 |
| Q13418 | ILK | 0\|3\|0 | 3 | 1 | 2\|2\|0 | 0.01 | 0.04 | 0.01 | 0.04 | 0.01 | −7.8 | 0.75 | 0.78 |
| Q9P265 | DIP28 | 2\|2\|4 | 8 | 2.67 | 2\|4\|0 | 0.01 | 0.02 | 0.01 | 0.02 | 0.01 | −6.67 | 1.33 | 0.8 |
| P04083 | ANXA1 | 2\|2\|4 | 8 | 2.67 | 4\|2\|0 | 0.01 | 0.02 | 0.01 | 0.02 | 0.01 | −6.67 | 1.33 | 0.8 |
| Q9H089 | LSG1 | 2\|0\|2 | 4 | 1.33 | 0\|2\|2 | 0.01 | 0.01 | 0.01 | 0.01 | 0.01 | −7.8 | 3 | 0.8 |
| P11766 | ADHS | 0\|5\|3 | 8 | 2.67 | 2\|3\|2 | 0.01 | 0.02 | 0.01 | 0.02 | 0.01 | −11.93 | 1.14 | 0.8 |
| Q92905 | COPSS | 4\|2\|7 | 13 | 4.33 | 4\|2\|3 | 0.01 | 0.03 | 0.01 | 0.03 | 0.01 | −10.42 | 1.44 | 0.79 |
| Q9ULC3 | RAB23 | 2\|0\|2 | 4 | 1.33 | 0\|2\|2 | 0.01 | 0.01 | 0.01 | 0.01 | 0.01 | −7.8 | 1 | 0.8 |
| O43237-2 | DYNC1LI2 | 3\|3\|4 | 10 | 3.33 | 0\|3\|3 | 0.01 | 0.02 | 0.01 | 0.02 | 0.01 | −5.36 | 1.67 | 0.79 |
| Q8N684-2 | ICPSF7 | 0\|0\|3 | 3 | 1 | 0\|2\|2 | 0.01 | 0.04 | 0.01 | 0.04 | 0.01 | −7.8 | 0.75 | 0.78 |
| Q15019 | 2-Sep | 2\|2\|0 | 4 | 1.33 | 2\|0\|2 | 0.01 | 0.01 | 0.01 | 0.01 | 0.01 | −7.8 | 1 | 0.8 |
| O95817 | BAG3 | 4\|5\|7 | 16 | 5.33 | 3\|4\|2 | 0.01 | 0.03 | 0.01 | 0.03 | 0.01 | −7.54 | 1.78 | 0.79 |
| P06753-3 | TPM3 | 2\|0\|2 | 4 | 1.33 | 2\|0\|2 | 0.01 | 0.01 | 0.01 | 0.01 | 0.01 | −7.8 | 1 | 0.8 |
| O14694 | USP10 | 2\|3\|2 | 7 | 2.33 | 3\|0\|2 | 0.01 | 0.01 | 0.01 | 0.01 | 0.01 | −5.66 | 1.4 | 0.8 |
| O14818 | PSMA7 | 2\|2\|0 | 4 | 1.33 | 0\|2\|2 | 0.01 | 0.01 | 0.01 | 0.01 | 0.01 | −7.8 | 1 | 0.8 |
| Q6DKJ4-3 | NXN | 2\|0\|2 | 4 | 1.33 | 0\|2\|2 | 0.01 | 0.01 | 0.01 | 0.01 | 0.01 | −7.8 | 3 | 0.8 |
| Q96Q11-2 | TRNT1 | 2\|2\|0 | 4 | 1.33 | 2\|0\|2 | 0.01 | 0.01 | 0.01 | 0.01 | 0.01 | −7.8 | 3 | 0.8 |
| Q10567-4 | AP181 | 2\|0\|2 | 4 | 1.33 | 2\|0\|2 | 0.01 | 0.01 | 0.01 | 0.01 | 0.01 | −7.8 | 1 | 0.8 |
| Q8TEU7-5 | RAPGEF6 | 3\|4\|2 | 9 | 3 | 2\|2\|2 | 0.01 | 0.02 | 0.01 | 0.02 | 0.01 | −6.91 | 1.5 | 0.8 |
| O5VV42 | CDKAL1 | 0\|2\|4 | 6 | 2 | 3\|3\|0 | 0.01 | 0.02 | 0.01 | 0.02 | 0.01 | −10.34 | 1 | 0.81 |
| Q9H910 | JPT2 | 3\|3\|4 | 10 | 3.33 | 0\|3\|3 | 0.01 | 0.02 | 0.01 | 0.02 | 0.01 | −5.36 | 1.67 | 0.79 |
| Q8TDN6 | BRIX1 | 0\|0\|3 | 3 | 1 | 2\|2\|0 | 0.01 | 0.04 | 0.01 | 0.04 | 0.01 | −7.8 | 0.75 | 0.78 |
| O14545 | TRAFD1 | 2\|3\|3 | 8 | 2.67 | 3\|0\|2 | 0.01 | 0.01 | 0.01 | 0.01 | 0.01 | −5.66 | 1.6 | 0.79 |
| Q9Y666 | SLC12A7 | 3\|3\|4 | 10 | 3.33 | 2\|4\|0 | 0.01 | 0.02 | 0.01 | 0.02 | 0.01 | −5.2 | 1.67 | 0.79 |
| O43159 | RRP8 | 0\|0\|3 | 3 | 1 | 2\|0\|2 | 0.01 | 0.04 | 0.01 | 0.04 | 0.01 | −7.8 | 0.75 | 0.78 |
| P46977 | STT3A | 5\|5\|2 | 12 | 4 | 0\|4\|3 | 0.01 | 0.02 | 0.01 | 0.02 | 0.01 | −7.93 | 1.71 | 0.78 |
| Q8NBF2-2 | NHLRC2 | 2\|2\|0 | 4 | 1.33 | 2\|0\|2 | 0.01 | 0.01 | 0.01 | 0.01 | 0.01 | −7.8 | 1 | 0.8 |
| P12694 | BCKDHA | 0\|6\|5 | 11 | 3.67 | 3\|3\|2 | 0.01 | 0.02 | 0.01 | 0.02 | 0.01 | −13.39 | 1.38 | 0.79 |
| Q86VF2-5 | IGFN1 | 0\|2\|0 | 2 | 0.67 | 4\|0\|0 | 0.01 | 0.02 | 0.01 | 0.02 | 0.01 | −7.28 | 0.5 | 0.8 |
| Q9NWT1 | PAK1IP1 | 3\|2\|0 | 5 | 1.67 | 3\|0\|2 | 0.01 | 0.01 | 0.01 | 0.01 | 0.01 | −9.13 | 1 | 0.81 |
| Q9Y312 | AAR2 | 4\|0\|0 | 4 | 1.33 | 4\|2\|0 | 0.01 | 0.02 | 0.01 | 0.02 | 0.01 | −10.2 | 0.67 | 0.8 |
| Q8TCU4-3 | ALMS1 | 5\|3\|5 | 13 | 4.33 | 2\|3\|2 | 0.01 | 0.02 | 0.01 | 0.02 | 0.01 | −6.63 | 1.86 | 0.78 |
| Q6ZSR9 | Q6ZSR9 | 4\|3\|2 | 9 | 3 | 2\|2\|2 | 0.01 | 0.02 | 0.01 | 0.02 | 0.01 | −6.91 | 1.5 | 0.8 |
| P49005 | POLD2 | 8\|7\|6 | 21 | 7 | 5\|4\|2 | 0.01 | 0.01 | 0.01 | 0.01 | 0.01 | −7.05 | 1.91 | 0.81 |
| Q9Y3D8 | AK6 | 2\|0\|3 | 5 | 1.67 | 3\|2\|0 | 0.01 | 0.01 | 0.01 | 0.01 | 0.01 | −9.13 | 1 | 0.81 |
| Q15738 | NSDHL | 8\|5\|3 | 16 | 5.33 | 2\|3\|5 | 0.01 | 0.04 | 0.01 | 0.04 | 0.01 | −10.17 | 1.6 | 0.79 |
| P17098 | ZNF8 | 2\|2\|0 | 4 | 1.33 | 2\|0\|2 | 0.01 | 0.01 | 0.01 | 0.01 | 0.01 | −7.8 | 1 | 0.8 |
| Q9Y6Y8 | SEC23IP | 4\|4\|4 | 12 | 4 | 3\|2\|2 | 0.01 | 0.01 | 0.01 | 0.01 | 0.01 | −5.22 | 1.71 | 0.81 |
| Q8N884 | MB21D1 | 2\|2\|2 | 6 | 2 | 0\|2\|2 | 0.01 | 0.01 | 0.01 | 0.01 | 0.01 | −4.67 | 1.5 | 0.79 |
| P61923 | COPZ1 | 2\|0\|2 | 4 | 1.33 | 0\|2\|2 | 0.01 | 0.01 | 0.01 | 0.01 | 0.01 | −7.8 | 1 | 0.8 |
| Q96G03 | PGM2 | 0\|3\|2 | 5 | 1.67 | 3\|0\|2 | 0.01 | 0.01 | 0.01 | 0.01 | 0.01 | −9.13 | 1 | 0.81 |
| O92530 | PSMF1 | 0\|2\|0 | 2 | 0.67 | 4\|0\|0 | 0.01 | 0.02 | 0.01 | 0.02 | 0.01 | −7.28 | 0.5 | 0.8 |
| Q15056-2 | EIF4H | 3\|2\|3 | 8 | 2.67 | 0\|3\|2 | 0.01 | 0.01 | 0.01 | 0.01 | 0.01 | −5.66 | 1.6 | 0.79 |
| Q14974 | KPNB1 | 2\|2\|0 | 4 | 1.33 | 2\|2\|0 | 0.01 | 0.01 | 0.01 | 0.01 | 0.01 | −7.8 | 1 | 0.8 |
| P40227 | CCT6A | 36\|34\|34 | 104 | 34.67 | 33\|35\|44 | 0 | 0 | 0 | 0 | 0 | −85.12 | 0.93 | 0.92 |
| P24941-2 | CDK2 | 5\|5\|5 | 15 | 5 | 5\|4\|6 | 0 | 0 | 0 | 0 | 0 | −13.14 | 1 | 0.92 |
| P16435 | POR | 5\|6\|4 | 15 | 5 | 9\|3\|8 | 0 | 0 | 0 | 0 | 0 | −20.73 | 0.75 | 0.92 |
| P84077 | ARF1 | 14\|13\|17 | 44 | 14.67 | 18\|14\|16 | 0 | 0 | 0 | 0 | 0 | −40.47 | 0.92 | 0.92 |
| P51610-4 | HCFC1 | 0\|2\|0 | 2 | 0.67 | 13\|5\|5 | 0 | 0 | 0 | 0 | 0 | −34.96 | 0.09 | 0.92 |
| Q00535 | CDKS | 4\|4\|4 | 12 | 4 | 4\|4\|3 | 0 | 0 | 0 | 0 | 0 | −9.88 | 1.09 | 0.88 |
| Q00534 | CDK6 | 10\|9\|8 | 27 | 9 | 8\|7\|7 | 0 | 0 | 0 | 0 | 0 | −17.01 | 1.23 | 0.9 |
| O00763-3 | ACACB | 07\|107\|11 | 327 | 109 | 16\|18\|10 | 0 | 0 | 0 | 0 | 0 | −248.32 | 0.96 | 0.92 |
| Q9UMZ2-8 | SYNRG | 9\|6\|6 | 21 | 7 | 11\|9\|7 | 0 | 0 | 0 | 0 | 0 | −26.11 | 0.78 | 0.92 |
| POC0S5 | H2AFZ | 2\|2\|2 | 6 | 2 | 2\|2\|2 | 0 | 0 | 0 | 0 | 0 | −6.91 | 3 | 0.92 |
| Q9UBM7 | DHCR7 | 2\|2\|0 | 0 | 1.33 | 0\|3\|2 | 0 | 0 | 0 | 0 | 0 | −9.13 | 0.8 | 0.83 |
| P02545 | LMNA | 12\|12\|14 | 38 | 12.67 | 17\|16\|20 | 0 | 0 | 0 | 0 | 0 | −48.41 | 0.72 | 0.92 |
| P40429 | RPL13A | 9\|9\|6 | 24 | 8 | 9\|10\|8 | 0 | 0 | 0 | 0 | 0 | −26.11 | 0.89 | 0.92 |
| Q7Z3T8 | ZFYVE16 | 5\|5\|3 | 13 | 4.33 | 11\|3\|9 | 0 | 0 | 0 | 0 | 0 | −26.5 | 0.57 | 0.92 |
| Q13838 | DDX39B | 9\|10\|11 | 30 | 10 | 11\|10\|12 | 0 | 0 | 0 | 0 | 0 | −28.56 | 0.91 | 0.92 |
| Q96T37-4 | RBM15 | 5\|5\|2 | 12 | 4 | 5\|2\|3 | 0 | 0 | 0 | 0 | 0 | −11.71 | 1.2 | 0.86 |
| P02769 | P02769 | 7\|9\|12 | 28 | 9.33 | 39\|5\|6 | 0 | 0 | 0 | 0 | 0 | −52.96 | 0.56 | 0.92 |
| P02768 | ALB | 2\|2\|2 | 6 | 2 | 4\|2\|2 | 0 | 0 | 0 | 0 | 0 | −9.29 | 0.75 | 0.92 |
| P04259 | KRT6B | 15\|14\|22 | 51 | 17 | 14\|15\|17 | 0 | 0 | 0 | 0 | 0 | −36.52 | 1.11 | 0.91 |
| P05387 | RPLP2 | 0\|4\|2 | 6 | 2 | 3\|3\|3 | 0 | 0 | 0 | 0 | 0 | −14.75 | 0.67 | 0.87 |
| P05388 | RPLP0 | 6\|0\|5 | 11 | 3.67 | 5\|5\|3 | 0 | 0 | 0 | 0 | 0 | −20.61 | 0.85 | 0.88 |
| P62979 | RPS27A | 32\|32\|29 | 93 | 31 | 25\|22\|21 | 0 | 0 | 0 | 0 | 0 | −40.71 | 1.37 | 0.92 |
| Q9BQ52-4 | ELAC2 | 5\|3\|2 | 10 | 3.33 | 2\|3\|3 | 0 | 0.01 | 0 | 0.01 | 0 | −9.29 | 1.25 | 0.83 |
| O76021 | RSL1D1 | 5\|0\|8 | 13 | 4.33 | 7\|5\|5 | 0 | 0 | 0 | 0 | 0 | −26.48 | 0.76 | 0.89 |
| Q15365 | PCBP1 | 24\|25\|25 | 74 | 24.67 | 24\|24\|24 | 0 | 0 | 0 | 0 | 0 | −52.54 | 1.03 | 0.92 |
| P29401 | TKT | 5\|3\|4 | 12 | 4 | 3\|4\|3 | 0 | 0 | 0 | 0 | 0 | −10.17 | 1.2 | 0.86 |
| Q13907 | IDI1 | 4\|4\|3 | 11 | 3.67 | 5\|6\|4 | 0 | 0 | 0 | 0 | 0 | −16.23 | 0.73 | 0.92 |
| P84085 | ARFS | 9\|7\|10 | 26 | 8.67 | 10\|6\|10 | 0 | 0 | 0 | 0 | 0 | −23.23 | 1 | 0.91 |
| Q9NY93-2 | DDX56 | 2\|2\|0 | 4 | 1.33 | 2\|0\|3 | 0 | 0 | 0 | 0 | 0 | −9.13 | 0.8 | 0.83 |
| P39023 | RPL3 | 17\|10\|21 | 48 | 16 | 23\|30\|25 | 0 | 0 | 0 | 0 | 0 | −85.6 | 0.62 | 0.92 |
| P35241 | RDX | 2\|2\|0 | 4 | 1.33 | 3\|3\|2 | 0 | 0 | 0 | 0 | 0 | −13.39 | 0.5 | 0.92 |
| O75439 | PMPCB | 11\|6\|12 | 29 | 9.67 | 9\|9\|11 | 0 | 0 | 0 | 0 | 0 | −28.68 | 1 | 0.91 |
| O95251-2 | KAT7 | 0\|3\|0 | 3 | 1 | 2\|3\|2 | 0 | 0 | 0 | 0 | 0 | −11.93 | 0.43 | 0.86 |
| Q96AC1 | FERMT2 | 13\|11\|15 | 39 | 13 | 9\|10\|14 | 0 | 0 | 0 | 0 | 0 | −25.58 | 1.18 | 0.91 |
| P62805 | HIST1H4L; | 2\|0\|0 | 2 | 0.67 | 314\|3 | 0 | 0 | 0 | 0 | 0 | −16.24 | 0.2 | 0.92 |
| | HIST1H4 | | | | | | | | | | | | |
| P10316 | HLA-A | 7\|6\|6 | 19 | 6.33 | 5\|3\|3 | 0 | 0 | 0 | 0 | 0 | −7.05 | 1.73 | 0.84 |
| P13646-3 | KRT13 | 9\|7\|7 | 23 | 7.67 | 9\|8\|6 | 0 | 0 | 0 | 0 | 0 | −19.64 | 1 | 0.91 |
| Q9H1A4 | ANAPC1 | 2\|3\|5 | 10 | 3.33 | 6\|6\|5 | 0 | 0 | 0 | 0 | 0 | −20.89 | 0.59 | 0.92 |
| Q72627-3 | IHUWE1 | 16\|10\|8 | 34 | 11.33 | 4\|7\|11 | 0 | 0 | 0 | 0 | 0 | −16.85 | 1.55 | 0.86 |
| Q09160 | HLA-A | 2\|2\|2 | 6 | 2 | 2\|3\|0 | 0 | 0 | 0 | 0 | 0 | −5.66 | 1.2 | 0.82 |
| Q99081 | TCF12 | 0\|0\|2 | 2 | 0.67 | 7\|3\|7 | 0 | 0 | 0 | 0 | 0 | −26.48 | 0.12 | 0.92 |
| Q9UKM9-2 | RALY | 2\|0\|0 | 2 | 0.67 | 2\|2\|2 | 0 | 0 | 0 | 0 | 0 | −10.44 | 0.33 | 0.92 |
| P60981-2 | DSTN | 5\|0\|3 | 8 | 2.67 | 3\|4\|6 | 0 | 0 | 0 | 0 | 0 | −20.61 | 0.62 | 0.89 |
| Q14562 | DHX8 | 2\|0\|0 | 2 | 0.67 | 0\|6\|4 | 0 | 0 | 0 | 0 | 0 | −15.87 | 0.2 | 0.92 |
| O60763 | USO1 | 4\|4\|3 | 11 | 3.67 | 5\|3\|3 | 0 | 0 | 0 | 0 | 0 | −11.36 | 3 | 0.88 |
| P18077 | RPL35A | 4\|4\|3 | 11 | 3.67 | 615\|5 | 0 | 0 | 0 | 0 | 0 | −17.53 | 0.69 | 0.92 |
| Q15181 | PPA1 | 7\|6\|11 | 24 | 8 | 7\|7\|9 | 0 | 0 | 0 | 0 | 0 | −21.17 | 1.04 | 0.9 |
| Q04637-8 | EIF4G1 | 17\|15\|17 | 49 | 16.33 | 14\|16\|13 | 0 | 0 | 0 | 0 | 0 | −31.53 | 1.14 | 0.92 |
| P17844 | DDX5 | 69\|79\|79 | 227 | 75.67 | 72\|66\|76 | 0 | 0 | 0 | 0 | 0 | −154.11 | 1.06 | 0.92 |
| Q7Z5K2 | WAPL | 0\|0\|3 | 3 | 1 | 3\|4\|2 | 0 | 0 | 0 | 0 | 0 | −14.75 | 0.33 | 0.92 |
| O94906 | PRPF6 | 0\|0\|2 | 2 | 0.67 | 5\|5\|4 | 0 | 0 | 0 | 0 | 0 | −22.08 | 0.14 | 0.92 |
| Q2TAY7 | SMU1 | 5\|4\|6 | 15 | 5 | 7\|3\|6 | | 0 | 0 | 0 | 0 | −15.82 | 0.94 | 0.9 |
| Q15054-3 | POLD3 | 3\|2\|2 | 7 | 2.33 | 2\|2\|3 | 0 | 0 | 0 | 0 | 0 | −8.1 | 1 | 0.86 |
| P04908 | HIST1H2AE; | 4\|3\|5 | 12 | 4 | 8\|6\|8 | 0 | 0 | 0 | | 0 | −25.42 | 0.55 | 0.92 |
| | HIST1H | | | | | | | | | | | | |
| Q8N3C0 | ASCC3 | 14\|14\|15 | 43 | 14.33 | 8\|11\|10 | 0 | 0 | 0 | 0 | | −16.64 | 1.48 | 0.9 |
| Q9NRF8 | CTPS2 | 2\|3\|0 | 5 | 1.67 | 2\|3\|2 | 0 | 0 | 0 | 0 | 0 | −11.93 | 0.71 | 0.86 |
| Q9BUF5 | TUBB6 | 35\|34\|37 | 106 | 35.33 | 41\|33\|34 | 0 | 0 | 0 | 0 | 0 | −80.35 | 0.98 | 0.92 |
| Q96CW5-2 | TUBGCP3 | 0\|0\|3 | 3 | 1 | 0\|2\|4 | 0 | 0.01 | 0 | 0.01 | 0 | −10.2 | 0.5 | 0.83 |
| P48960-2 | CD97 | 3\|4\|5 | 12 | 4 | 6\|2\|5 | 0 | 0 | 0 | 0 | 0 | −13.76 | 0.92 | 0.89 |
| O562R1 | ACTBL2 | 34\|32\|38 | 104 | 34.67 | 47\|36\|37 | 0 | 0 | 0 | 0 | 0 | −98.01 | 0.87 | 0.92 |
| Q02878 | RPL6 | 22\|20\|20 | 62 | 20.67 | 26\|21\|23 | 0 | 0 | 0 | 0 | 0 | −56.15 | 0.89 | 0.92 |
| P16152 | CBR1 | 3\|8\|4 | 15 | 5 | 8\|6\|5 | 0 | 0 | 0 | 0 | 0 | −21.43 | 0.79 | 0.9 |
| Q9UNX3 | RPL26L1 | 11\|13\|13 | 37 | 12.33 | 15\|11\|13 | 0 | 0 | 0 | 0 | 0 | −32.69 | 0.95 | 0.92 |
| Q9UNX4 | WDR3 | 3\|2\|2 | 7 | 2.33 | 3\|3\|0 | 0 | 0 | 0 | 0 | 0 | −6.82 | 1.17 | 0.84 |
| Q9Y5S2 | CDC42BPB | 0\|0\|2 | 2 | 0.67 | 6\|3\|3 | 0 | 0 | 0 | 0 | 0 | −19.11 | 0.17 | 0.92 |
| Q9UGP8 | SEC63 | 3\|3\|3 | 9 | 3 | 3\|2\|2 | 0 | 0 | 0 | 0 | 0 | −6.63 | 1.29 | 0.84 |
| O43776 | NARS | 12\|15\|13 | 40 | 13.33 | 12\|16\|11 | 0 | 0 | 0 | 0 | 0 | −31.17 | 1.03 | 0.91 |
| P26640 | VARS | 24\|19\|23 | 66 | 22 | 16\|19\|20 | 0 | 0 | 0 | 0 | 0 | −39.82 | 1.2 | 0.92 |
| P26641 | EEF1G | 15\|12\|17 | 44 | 14.67 | 16\|16\|16 | 0 | 0 | 0 | 0 | 0 | −42.12 | 0.92 | 0.92 |
| Q16527 | CSRP2 | 10\|10\|14 | 34 | 11.33 | 10\|9\|9 | 0 | 0 | 0 | 0 | 0 | −21.15 | 1.21 | 0.91 |
| Q71UM5 | RPS27L | 8\|8\|11 | 27 | 9 | 9\|7\|5 | 0 | 0 | 0 | 0 | 0 | −15.83 | 1.29 | 0.89 |
| P60709 | ACTB | 100\|94\|10 | 296 | 98.67 | 109\|107\|97 | 0 | 0 | 0 | 0 | 0 | −234.56 | 0.95 | 0.92 |
| Q6Y7W6-4 | GIGYF2 | 7\|9\|6 | 22 | 7.33 | 5\|11\|9 | 0 | 0 | 0 | 0 | 0 | −23.67 | 0.88 | 0.91 |
| O00203-3 | AP381 | 2\|2\|0 | 4 | 1.33 | 3\|3\|3 | 0 | 0 | 0 | 0 | 0 | −14.75 | 0.44 | 0.92 |
| Q9UHB6-5 | LIMA1 | 8\|7\|8 | 23 | 7.67 | 5\|5\|6 | 0 | 0 | 0 | 0 | 0 | −11.43 | 1.44 | 0.88 |
| Q9UHB6-2 | LIMA1 | 12\|7\|8 | 27 | 9 | 6\|5\|7 | 0 | 0 | 0 | 0 | 0 | −13.76 | 1.5 | 0.86 |
| Q9NUU7 | DDX19A | 14\|9\|10 | 33 | 11 | 8\|3\|8 | 0 | 0 | 0 | 0 | 0 | −12.07 | 1.74 | 0.84 |
| O75400-2 | PRPF40A | 2\|2\|2 | 6 | 2 | 0\|4\|2 | 0 | 0 | 0 | 0 | 0 | −6.67 | 1 | 0.92 |
| P49411 | TUFM | 27\|26\|30 | 83 | 27.67 | 33\|26\|27 | 0 | 0 | 0 | 0 | 0 | −66.16 | 0.97 | 0.92 |
| P48147 | PREP | 4\|5\|3 | 12 | 4 | 7\|3\|4 | 0 | 0 | 0 | 0 | 0 | −15.01 | 0.86 | 0.9 |
| P23588 | EIF4B | 10\|12\|8 | 30 | 10 | 10\|8\|7 | 0 | 0 | 0 | 0 | 0 | −20.53 | 1.2 | 0.9 |
| P62495 | ETF1 | 4\|4\|6 | 14 | 4.67 | 3\|3\|3 | 0 | 0.01 | 0 | 0.01 | 0 | −7.54 | 1.56 | 0.82 |
| Q14966 | ZNF638 | 0\|2\|5 | 7 | 2.33 | 9\|7\|4 | 0 | 0 | 0 | 0 | 0 | −30.9 | 0.35 | 0.92 |
| P50395 | GDI2 | 13\|14\|17 | 44 | 14.67 | 16\|19\|19 | 0 | 0 | 0 | 0 | 0 | −47.91 | 0.81 | 0.92 |
| P49841-2 | GSK3B | 7\|5\|8 | 20 | 6.67 | 4\|6\|3 | 0 | 0 | 0 | 0 | 0 | −10.78 | 1.54 | 0.85 |
| Q13643 | FHL3 | 0\|2\|2 | 4 | 1.33 | 3\|2\|2 | 0 | 0 | 0 | 0 | 0 | −11.93 | 0.57 | 0.92 |
| P25205 | MCM3 | 0\|2\|2 | 4 | 1.33 | 3\|2\|2 | 0 | 0 | 0 | 0 | 0 | −11.93 | 0.57 | 0.92 |
| Q16186 | ADRM1 | 6\|6\|5 | 17 | 5.67 | 3\|2\|6 | 0 | 0 | 0 | 0 | 0 | −8.47 | 1.55 | 0.85 |
| Q12873-2 | CHD3 | 2\|0\|2 | 4 | 1.33 | 3\|4\|5 | 0 | 0 | 0 | 0 | 0 | −19.11 | 0.33 | 0.92 |
| A0MZ66 | SHTN1 | 16\|17\|17 | 50 | 16.67 | 19\|19\|21 | 0 | 0 | 0 | 0 | 0 | −49.12 | 0.85 | 0.92 |
| Q96HS1 | PGAM5 | 3\|2\|3 | 8 | 2.67 | 6\|4\|3 | 0 | 0 | 0 | 0 | 0 | −15.55 | 0.62 | 0.92 |
| Q72478 | DHX29 | 4\|5\|2 | 11 | 3.67 | 3\|3\|2 | 0 | 0.01 | 0 | 0.01 | 0 | −9.29 | 1.38 | 0.83 |
| Q99613-2 | EIF3C | 18\|18\|17 | 53 | 17.67 | 17\|17\|13 | 0 | 0 | 0 | 0 | 0 | −33.33 | 1.13 | 0.92 |
| 21399 | ACO1 | 4\|7\|4 | 15 | 5 | 3\|6\|4 | 0 | 0 | 0 | 0 | 0 | −12.24 | 1.15 | 0.87 |
| Q12797-10 | ASPH | 4\|4\|4 | 12 | 4 | 3\|3\|2 | 0 | 0 | 0 | 0 | 0 | −6.37 | 1.5 | 0.84 |
| O15067 | PFAS | 24\|17\|24 | 65 | 21.67 | 21\|21\|25 | 0 | 0 | 0 | 0 | 0 | −57.34 | 0.97 | 0.92 |
| P10909-4 | ICLU | 89\|9 | 26 | 8.67 | 10\|8\|7 | 0 | 0 | 0 | 0 | 0 | −20.53 | 1.04 | 0.91 |
| Q9NZM5 | NOP53 | 2\|0\|0 | 2 | 0.67 | 0\|2\|2 | 0 | 0.01 | 0 | 0.01 | 0 | −7.8 | 0.5 | 0.82 |
| P31942-2 | HNRNPH3 | 3\|3\|3 | 9 | 3 | 4\|5\|4 | 0 | 0 | 0 | 0 | 0 | −13.76 | 0.69 | 0.92 |
| Q86YP4-2 | GATAD2A | 5\|5\|4 | 14 | 4.67 | 7\|5\|5 | 0 | 0 | 0 | 0 | 0 | −17.06 | 0.82 | 0.92 |
| Q9NW64 | RBM22 | 5\|4\|8 | 17 | 5.67 | 4\|7\|8 | 0 | 0 | 0 | 0 | 0 | −19.55 | 0.89 | 0.9 |
| Q9BXP5-5 | SRRT | 4\|3\|2 | 9 | 3 | 4\|4\|4 | 0 | 0 | 0 | 0 | 0 | −14.21 | 0.75 | 0.92 |
| P06748-2 | NPM1 | 4\|6\|4 | 14 | 4.67 | 9\|8\|9 | 0 | 0 | 0 | 0 | 0 | −28.65 | 0.54 | 0.92 |
| Q9Y295 | DRG1 | 7\|9\|8 | 24 | 8 | 10\|4\|4 | 0 | 0 | 0 | 0 | 0 | −13.51 | 1.33 | 0.89 |
| Q6UXN9 | WDR82 | 5\|4\|4 | 13 | 4.33 | 4\|6\|4 | 0 | 0 | 0 | 0 | 0 | −13.43 | 0.93 | 0.9 |
| P17066 | HSPA6 | 14\|13\|12 | 39 | 13 | 13\|9\|12 | 0 | 0 | 0 | 0 | 0 | −25.3 | 1.15 | 0.91 |
| P49959 | MRE11 | 4\|4\|6 | 14 | 4.67 | 6\|5\|4 | 0 | 0 | 0 | 0 | 0 | −14.57 | 0.93 | 0.89 |
| P49790 | NUP153 | 27\|26\|26 | 79 | 26.33 | 27\|29\|26 | 0 | 0 | 0 | 0 | 0 | −61.39 | 0.96 | 0.92 |
| Q01813 | PFKP | 14\|15\|14 | 43 | 14.33 | 23\|22\|21 | 0 | 0 | 0 | 0 | 0 | −61.35 | 0.65 | 0.92 |
| P49792 | RANBP2 | 48\|42\|50 | 140 | 46.67 | 64\|55\|55 | 0 | 0 | 0 | 0 | 0 | −148.4 | 0.8 | 0.92 |
| P56545 | CTBP2 | 4\|4\|3 | 11 | 3.67 | 4\|2\|5 | 0 | 0 | 0 | 0 | 0 | −11.36 | 1 | 0.88 |
| O60293-2 | ZFC3H1 | 2\|2\|2 | 6 | 2 | 0\|3\|4 | 0 | 0 | 0 | 0 | 0 | −7.93 | 0.86 | 0.92 |
| O76031 | CLPX | 6\|4\|5 | 15 | 5 | 7\|5\|4 | 0 | 0 | 0 | 0 | 0 | −15.82 | 0.94 | 0.9 |
| Q8WWK9- | CKAP2 | 0\|2\|2 | 4 | 1.33 | 2\|2\|2 | 0 | 0 | 0 | 0 | 0 | −10.44 | 0.67 | 0.92 |
| Q9NRZ9-3 | HELLS | 4\|4\|9 | 17 | 5.67 | 51\|50\|52 | 0 | 0 | 0 | 0 | 0 | −211.19 | 0.11 | 0.92 |
| Q86W42-3 | THOC6 | 3\|5\|4 | 12 | 4 | 4\|4\|4 | 0 | 0 | 0 | 0 | 0 | −12.5 | 1 | 0.88 |
| O00154-6 | ACOT7 | 5\|5\|5 | 15 | 5 | 8\|5\|4 | 0 | 0 | 0 | 0 | 0 | −15.5 | 0.88 | 0.92 |
| P62873-2 | GNB1 | 3\|5\|3 | 11 | 3.67 | 2\|3\|5 | 0 | 0 | 0 | 0 | 0 | −10.17 | 1.1 | 0.87 |
| P31483 | TIA1 | 3\|5\|5 | 13 | 4.33 | 4\|4\|4 | 0 | 0 | 0 | 0 | 0 | −12.5 | 1.08 | 0.88 |
| P26368-2 | U2AF2 | 10\|10\|11 | 31 | 10.33 | 20\|9\|7 | 0 | 0 | 0 | 0 | 0 | −30.03 | 0.86 | 0.92 |
| O00505 | KPNA3 | 2\|2\|0 | 4 | 1.33 | 3\|3\|2 | 0 | 0 | 0 | 0 | 0 | −13.39 | 0.5 | 0.92 |
| Q9Y4P3 | TBL2 | 4\|6\|3 | 13 | 4.33 | 4\|6\|4 | 0 | 0 | 0 | 0 | 0 | −15.01 | 0.93 | 0.89 |
| P08708 | RPS17 | 7\|5\|7 | 19 | 6.33 | 3\|8\|11 | 0 | 0 | 0 | 0 | 0 | −21.3 | 0.86 | 0.92 |
| Q01581 | HMGCS1 | 20\|19\|20 | 59 | 19.67 | 17\|19\|22 | 0 | 0 | 0 | 0 | 0 | −43.35 | 1.02 | 0.92 |
| P29692 | EEFID | 12\|11\|15 | 38 | 12.67 | 7\|8\|10 | 0 | 0 | 0 | 0 | 0 | −16.22 | 1.52 | 0.89 |
| P78344 | EIF4G2 | 34\|37\|35 | 106 | 35.33 | 21\|11\|14 | 0 | 0 | 0 | 0 | 0 | −10.86 | 2.3 | 0.87 |
| Q9H2U1-3 | DHX36 | 5\|6\|5 | 16 | 5.33 | 4\|3\|3 | 0 | 0 | 0 | 0 | 0 | −7.29 | 1.6 | 0.84 |
| Q9BXB5 | OSBPL10 | 3\|2\|2 | 7 | 2.33 | 2\|3\|2 | 0 | 0 | 0 | 0 | 0 | −8.1 | 1 | 0.86 |
| Q14566 | MCM6 | 13\|13\|13 | 39 | 13 | 8\|13\|16 | 0 | 0 | 0 | 0 | 0 | −27.34 | 1.05 | 0.91 |
| O00139-2 | KIF2A | 5\|6\|4 | 15 | 5 | 3\|5\|5 | 0 | 0 | 0 | 0 | 0 | −12.24 | 1.15 | 0.88 |
| Q15637-4 | SF1 | 2\|0\|2 | 4 | 1.33 | 2\|2\|3 | 0 | 0 | 0 | 0 | 0 | −11.93 | 0.57 | 0.92 |
| P62703 | RPS4X | 38\|36\|42 | 116 | 38.67 | 39\|41\|36 | 0 | 0 | 0 | 0 | 0 | −86.88 | 1 | 0.92 |
| P27694 | RPA1 | 13\|14\|14 | 41 | 13.67 | 12\|10\|19 | 0 | 0 | 0 | 0 | 0 | −31.95 | 3 | 0.92 |
| P27695 | APEX1 | 2\|2\|0 | 4 | 1.33 | 3\|0\|3 | 0 | 0 | 0 | 0 | 0 | −10.34 | 0.67 | 0.92 |
| P17858 | PFKL | 3\|4\|3 | 10 | 3.33 | 6\|7\|8 | 0 | 0 | 0 | 0 | 0 | −24.06 | 0.48 | 0.92 |
| Q9BTC0 | DIDO1 | 3\|2\|3 | 8 | 2.67 | 6\|4\|4 | 0 | 0 | 0 | 0 | 0 | −16.88 | 0.57 | 0.92 |
| O75083 | WDR1 | 9\|14\|12 | 35 | 11.67 | 19\|19\|14 | 0 | 0 | 0 | 0 | 0 | −52.8 | 0.67 | 0.92 |
| O43252 | PAPSS1 | 3\|3\|4 | 10 | 3.33 | 2\|2\|3 | 0 | 0.01 | 0 | 0.01 | 0 | −6.63 | 1.43 | 0.83 |
| Q15149-7 | PLEC | 66\|60\|73 | 199 | 66.33 | 66\|62\|65 | 0 | 0 | 0 | 0 | 0 | −142.57 | 1.03 | 0.92 |
| P62913-2 | RPL11 | 3\|4\|3 | 10 | 3.33 | 3\|4\|4 | 0 | 0 | 0 | 0 | 0 | −11.36 | 0.91 | 0.89 |
| P53350 | PLK1 | 2\|3\|4 | 9 | 3 | 3\|3\|5 | 0 | 0 | 0 | 0 | 0 | −12.99 | 0.82 | 0.89 |
| P35251-2 | RFC1 | 3\|3\|3 | 9 | 3 | 5\|4\|4 | 0 | 0 | 0 | 0 | 0 | −13.76 | 0.69 | 0.92 |
| P54886 | ALDH18A1 | 12\|13\|16 | 41 | 13.67 | 21\|16\|18 | 0 | 0 | 0 | 0 | 0 | −50.95 | 0.75 | 0.92 |
| Q02978-2 | SLC25A11 | 4\|2\|4 | 10 | 3.33 | 3\|2\|2 | 0 | 0.01 | 0 | 0.01 | 0 | −8.1 | 1.43 | 0.82 |
| P52732 | KIF11 | 8\|9\|6 | 23 | 7.67 | 10\|11\|9 | 0 | 0 | 0 | 0 | 0 | −29.94 | 0.77 | 0.92 |
| P46781 | RPS9 | 14\|14\|15 | 43 | 14.33 | 14\|16\|17 | 0 | 0 | 0 | 0 | 0 | −37.71 | 0.91 | 0.92 |
| O94808 | GFPT2 | 2\|2\|2 | 6 | 2 | 3\|2\|3 | 0 | 0 | 0 | 0 | 0 | −9.29 | 0.75 | 0.92 |
| P11182 | DBT | 63\|65\|62 | 190 | 63.33 | 59\|65\|71 | 0 | 0 | 0 | 0 | 0 | −141.96 | 0.97 | 0.92 |
| Q99459 | CDC5L | 3\|0\|3 | 6 | 2 | 7\|5\|5 | 0 | 0 | 0 | 0 | 0 | −26.48 | 0.35 | 0.92 |
| O75376 | NCOR1 | 2\|0\|3 | 5 | 1.67 | 7\|7\|8 | 0 | 0 | 0 | 0 | 0 | −33.84 | 0.23 | 0.92 |
| P11216 | PYGB | 2\|2\|2 | 6 | 2 | 3\|3\|3 | 0 | 0 | 0 | 0 | 0 | −10.42 | 0.67 | 0.92 |
| Q16512 | PKN1 | 4\|5\|5 | 14 | 4.67 | 4\|5\|5 | 0 | 0 | 0 | 0 | 0 | −13.43 | 1 | 0.89 |
| P20020-5 | ATP281 | 2\|2\|0 | 4 | 1.33 | 0\|2\|4 | 0 | 0 | 0 | 0 | 0 | −10.2 | 0.67 | 0.92 |
| P20340-2 | RAB6A | 10\|12\|10 | 32 | 10.67 | 11\|11\|12 | 0 | 0 | 0 | 0 | 0 | −28.23 | 0.94 | 0.91 |
| P40939 | HADHA | 17\|14\|22 | 53 | 17.67 | 16\|14\|19 | 0 | 0 | 0 | 0 | 0 | −40.12 | 1.08 | 0.92 |
| P36915 | GNL1 | 2\|2\|3 | 7 | 2.33 | 3\|2\|2 | 0 | 0 | 0 | 0 | 0 | −8.1 | 1 | 0.86 |
| A0A0B4J2D | LOC- | 0\|2\|0 | 2 | 0.67 | 2\|0\|2 | 0 | 0.01 | 0 | 0.01 | 0 | −7.8 | 0.5 | 0.82 |
| | 102724023 | | | | | | | | | | | | |
| Q9UNF1-2 | MAGED2 | 3\|3\|5 | 11 | 3.67 | 4\|2\|3 | 0 | 0 | 0 | 0 | 0 | −8.99 | 1.22 | 0.85 |
| P31943 | HNRNPH1 | 43\|43\|41 | 127 | 42.33 | 44\|47\|54 | 0 | 0 | 0 | 0 | 0 | −114.1 | 0.88 | 0.92 |
| Q13356 | PPIL2 | 2\|2\|3 | 7 | 2.33 | 5\|4\|4 | 0 | 0 | 0 | 0 | 0 | −15.55 | 0.54 | 0.92 |
| Q8N1F7 | NUP93 | 4\|4\|5 | 13 | 4.33 | 4\|3\|6 | 0 | 0 | 0 | 0 | 0 | −12.24 | 1 | 0.89 |
| Q9BSV6 | TSEN34 | 4\|0\|3 | 7 | 2.33 | 3\|4\|0 | 0 | 0.01 | 0 | 0.01 | 0 | −11.76 | 1 | 0.83 |
| Q9Y316-2 | MEMO1 | 3\|0\|2 | 5 | 1.67 | 0\|2\|4 | 0 | 0.01 | 0 | 0.01 | 0 | −10.2 | 0.83 | 0.83 |
| P38646 | HSPA9 | 33\|28\|32 | 93 | 31 | 36\|42\|34 | 0 | 0 | 0 | 0 | 0 | −94.79 | 0.83 | 0.92 |
| Q9UMS4 | PRPF19 | 4\|2\|6 | 12 | 4 | 8\|9\|12 | 0 | 0 | 0 | 0 | 0 | −37.55 | 0.41 | 0.92 |
| P49916-4 | LIG3 | 0\|0\|2 | 2 | 0.67 | 2\|2\|0 | 0 | 0.01 | 0 | 0.01 | 0 | −7.8 | 0.5 | 0.82 |
| P60953 | CDC42 | 6\|7\|6 | 19 | 6.33 | 6\|6\|4 | 0 | 0 | 0 | 0 | 0 | −12.86 | 1.19 | 0.89 |
| Q9Y5B9 | SUPT16H | 12\|8\|11 | 31 | 10.33 | 12\|10\|9 | 0 | 0 | 0 | 0 | 0 | −27.73 | 1 | 0.91 |
| Q12986-2 | INFX1 | 3\|0\|2 | 5 | 1.67 | 2\|2\|3 | 0 | 0 | 0 | 0 | 0 | −11.93 | 0.71 | 0.86 |
| Q9GZT8-2 | INIF3L1 | 2\|3\|3 | 8 | 2.67 | 4\|4\|3 | 0 | 0 | 0 | 0 | 0 | −12.99 | 0.73 | 0.92 |
| O60610-2 | DIAPH1 | 4\|8\|3 | 15 | 5 | 6\|9\|8 | 0 | 0 | 0 | 0 | 0 | −26.78 | 0.65 | 0.91 |
| Q8IVF2-3 | AHNAK2 | 2\|5\|4 | 11 | 3.67 | 6\|4\|3 | 0 | 0 | 0 | 0 | 0 | −15.55 | 0.85 | 0.89 |
| Q9H0C8 | ILKAP | 2\|2\|2 | 6 | 2 | 2\|3\|3 | 0 | 0 | 0 | 0 | 0 | −9.29 | 0.75 | 0.92 |
| Q96151-2 | RCC1L | 0\|2\|0 | 2 | 0.67 | 0\|2\|2 | 0 | 0.01 | 0 | 0.01 | 0 | −7.8 | 0.5 | 0.82 |
| Q99460-2 | PSMD1 | 6\|6\|10 | 22 | 7.33 | 13\|9\|8 | 0 | 0 | 0 | 0 | 0 | −29.94 | 0.73 | 0.92 |
| Q13586 | STIM1 | 2\|2\|0 | 4 | 1.33 | 3\|3\|0 | 0 | 0 | 0 | 0 | 0 | −10.34 | 0.67 | 0.92 |
| Q86UR5-1 | RIMS1 | 2\|2\|0 | 4 | 1.33 | 3\|3\|2 | 0 | 0 | 0 | 0 | 0 | −13.39 | 0.5 | 0.92 |
| P30566 | ADSL | 3\|2\|2 | 7 | 2.33 | 2\|2\|3 | 0 | 0 | 0 | 0 | 0 | −8.1 | 1 | 0.86 |
| Q81X01-4 | SUGP2 | 7\|7\|5 | 19 | 6.33 | 24\|20\|24 | 0 | 0 | 0 | 0 | 0 | −84.41 | 0.28 | 0.92 |
| O95628-8 | CNOT4 | 0\|0\|2 | 2 | 0.67 | 2\|2\|0 | 0 | 0.01 | 0 | 0.01 | 0 | −7.8 | 0.5 | 0.82 |
| Q9NW13 | RBM28 | 4\|4\|3 | 11 | 3.67 | 5\|6\|7 | 0 | 0 | 0 | 0 | 0 | −20.1 | 0.61 | 0.92 |
| P38159 | RBMX | 16\|20\|21 | 57 | 19 | 34\|31\|32 | 0 | 0 | 0 | 0 | 0 | −98.01 | 0.59 | 0.92 |
| Q81WZ3-6 | ANKHD1 | 9\|9\|12 | 30 | 10 | 6\|12\|10 | 0 | 0 | 0 | 0 | 0 | −22.61 | 1.07 | 0.91 |
| Q9Y285 | FARSA | 3\|4\|4 | 11 | 3.67 | 3\|5\|5 | 0 | 0 | 0 | 0 | 0 | −13.76 | 0.85 | 0.92 |
| P43034 | PAFAH1B1 | 6\|8\|10 | 24 | 8 | 7\|4\|8 | 0 | 0 | 0 | 0 | 0 | −16.39 | 1.26 | 0.89 |
| Q9BRJ2 | MRPL45 | 4\|5\|4 | 13 | 4.33 | 4\|2\|4 | 0 | 0 | 0 | 0 | 0 | −8.71 | 1.3 | 0.86 |
| Q9BWM7 | SFXN3 | 3\|2\|3 | 8 | 2.67 | 3\|0\|4 | 0 | 0 | 0 | 0 | 0 | −7.93 | 1.14 | 0.85 |
| Q06124 | PTPN11 | 2\|3\|3 | 8 | 2.67 | 3\|4\|4 | 0 | 0 | 0 | 0 | 0 | −12.99 | 0.73 | 0.92 |
| P31939-2 | ATIC | 8\|9\|5 | 22 | 7.33 | 7\|7\|4 | 0 | 0 | 0 | 0 | 0 | −16.65 | 1.22 | 0.89 |
| Q9UHX1-4 | PUF60 | 9\|8\|10 | 27 | 9 | 6\|9\|6 | 0 | 0 | 0 | 0 | 0 | −15.83 | 1.29 | 0.9 |
| P13010 | XRCC5 | 46\|45\|45 | 136 | 45.33 | 45\|51\|49 | 0 | 0 | 0 | 0 | 0 | −107.91 | 0.94 | 0.92 |
| Q9UPQ9-1 | TNRC6B | 17\|12\|12 | 41 | 13.67 | 13\|15\|18 | 0 | 0 | 0 | 0 | 0 | −39.65 | 0.89 | 0.92 |
| O95340 | PAPSS2 | 8\|5\|6 | 19 | 6.33 | 4\|7\|6 | 0 | 0 | 0 | 0 | 0 | −15.5 | 1.12 | 0.89 |
| O95347 | SMC2 | 18\|18\|15 | 51 | 17 | 14\|13\|18 | 0 | 0 | 0 | 0 | 0 | −33.87 | 1.13 | 0.92 |
| Q8IZP0-3 | ABI1 | 12\|12\|13 | 37 | 12.33 | 11\|11\|9 | 0 | 0 | 0 | 0 | 0 | −21.79 | 1.19 | 0.91 |
| Q8IZP0-2 | ABI1 | 11\|10\|12 | 33 | 11 | 10\|10\|8 | 0 | 0 | 0 | 0 | 0 | −21.15 | 1.18 | 0.91 |
| Q99729-3 | HNRNPAB | 5\|4\|4 | 13 | 4.33 | 4\|4\|5 | 0 | 0 | 0 | 0 | 0 | −12.24 | 1 | 0.89 |
| Q9Y310 | RTCB | 15\|18\|8 | 41 | 13.67 | 15\|13\|13 | 0 | 0 | 0 | 0 | 0 | −40.39 | 1 | 0.91 |
| P37108 | SRP14 | 5\|5\|7 | 17 | 5.67 | 4\|4\|3 | 0 | 0 | 0 | 0 | 0 | −8.45 | 1.55 | 0.84 |
| P62829 | RPL23 | 15\|13\|13 | 41 | 13.67 | 14\|13\|14 | 0 | 0 | 0 | 0 | 0 | −32.08 | 3 | 0.92 |
| P62820 | RABIA | 18\|14\|16 | 48 | 16 | 15\|18\|16 | 0 | 0 | 0 | 0 | 0 | −40.12 | 0.98 | 0.92 |
| P62826 | RAN | 14\|15\|19 | 48 | 16 | 18\|15\|18 | 0 | 0 | 0 | 0 | 0 | −42.54 | 0.94 | 0.92 |
| Q9Y4W6 | AFG3L2 | 3\|3\|3 | 9 | 3 | 3\|3\|6 | 0 | 0 | 0 | 0 | 0 | −12.5 | 0.75 | 0.92 |
| Q08378-2 | GOLGA3 | 0\|3\|2 | 5 | 1.67 | 6\|4\|0 | 0 | 0 | 0 | 0 | 0 | −15.87 | 0.5 | 0.92 |
| Q9NXH9-2 | TRMT1 | 8\|11\|8 | 27 | 9 | 8\|10\|10 | 0 | 0 | 0 | 0 | 0 | −24.09 | 0.96 | 0.91 |
| O95299 | NDUFA10 | 5\|0\|6 | 11 | 3.67 | 3\|3\|3 | 0 | 0.01 | 0 | 0.01 | 0 | −14.75 | 1.22 | 0.82 |
| Q92615 | LARP4B | 5\|9\|6 | 20 | 6.67 | 6\|7\|6 | 0 | 0 | 0 | 0 | 0 | −17.88 | 1.05 | 0.9 |
| Q99661 | KIF2C | 4\|5\|6 | 15 | 5 | 6\|6\|5 | 0 | 0 | 0 | 0 | 0 | −17.06 | 0.88 | 0.9 |
| Q9Y4E8 | USP15 | 8\|5\|5 | 18 | 6 | 4\|4\|7 | 0 | 0 | 0 | 0 | 0 | −13.14 | 1.2 | 0.88 |
| P43490 | NAMPT | 20\|17\|20 | 57 | 19 | 18\|17\|19 | 0 | 0 | 0 | 0 | 0 | −41.54 | 1.06 | 0.92 |
| Q9BZK7 | TBL1XR1 | 2\|2\|2 | 6 | 2 | 4\|2\|5 | 0 | 0 | 0 | 0 | 0 | −12.99 | 0.55 | 0.92 |
| Q81YWS | RNF168 | 0\|0\|2 | 2 | 0.67 | 2\|3\|0 | 0 | 0 | 0 | 0 | 0 | −9.13 | 0.4 | 0.84 |
| P13674-3 | P4HA1 | 3\|2\|3 | 8 | 2.67 | 2\|3\|3 | 0 | 0 | 0 | 0 | 0 | −9.29 | 1 | 0.86 |
| P46063 | RECOL | 6\|6\|6 | 18 | 6 | 4\|4\|2 | 0 | 0 | 0 | 0 | 0 | −5.91 | 1.8 | 0.83 |
| O75964 | ATPSL | 2\|0\|2 | 4 | 1.33 | 2\|3\|0 | 0 | 0 | 0 | 0 | 0 | −9.13 | 0.8 | 0.83 |
| P42765 | ACAA2 | 69\|10 | 25 | 8.33 | 3\|6\|9 | 0 | 0 | 0 | 0 | 0 | −15.11 | 1.39 | 0.88 |
| P42766 | RPL35 | 4\|2\|2 | 8 | 2.67 | 5\|3\|3 | 0 | 0 | 0 | 0 | 0 | −12.99 | 0.73 | 0.89 |
| P22087 | FBL | 5\|5\|4 | 14 | 4.67 | 6\|5\|6 | 0 | 0 | 0 | 0 | 0 | −17.06 | 0.82 | 0.92 |
| P68371 | TUBB4B | 14\|112\|11 | 345 | 115 | 14\|111\|10 | 0 | 0 | 0 | 0 | 0 | −232.7 | 1.03 | 0.92 |
| Q9UHD1 | CHORDC1 | 12\|11\|14 | 37 | 12.33 | 14\|14\|9 | 0 | 0 | 0 | 0 | 0 | −30.3 | 1 | 0.91 |
| Q96GX5-2 | MASTL | 0\|2\|0 | 2 | 0.67 | 0\|3\|5 | 0 | 0 | 0 | 0 | 0 | −13.16 | 0.25 | 0.92 |
| P53618 | COPB1 | 10\|14\|12 | 36 | 12 | 12\|13\|15 | 0 | 0 | 0 | 0 | 0 | −35.55 | 0.9 | 0.92 |
| P62318-2 | SNRPD3 | 2\|2\|2 | 6 | 2 | 2\|3\|2 | 0 | 0 | 0 | 0 | 0 | −8.1 | 0.86 | 0.92 |
| P18124 | RPL7 | 17\|18\|16 | 51 | 17 | 24\|13\|15 | 0 | 0 | 0 | 0 | 0 | −40.43 | 0.98 | 0.92 |
| P50991 | CCT4 | 23\|20\|28 | 71 | 23.67 | 25\|24\|31 | 0 | 0 | 0 | 0 | 0 | −68.46 | 0.89 | 0.92 |
| P24666 | ACP1 | 5\|5\|5 | 15 | 5 | 3\|4\|4 | 0 | 0 | 0 | 0 | 0 | −8.45 | 1.36 | 0.87 |
| Q9GZS3 | WDR61 | 3\|4\|3 | 10 | 3.33 | 2\|4\|3 | 0 | 0 | 0 | 0 | 0 | −8.99 | 1.11 | 0.87 |
| Q96HC4 | PDLIM5 | 6\|8\|9 | 23 | 7.67 | 7\|7\|5 | 0 | 0 | 0 | 0 | 0 | −16.39 | 1.21 | 0.9 |
| 095433 | AHSA1 | 21\|27\|21 | 69 | 23 | 23\|19\|22 | 0 | 0 | 0 | 0 | 0 | −47.49 | 1.08 | 0.92 |
| P49327 | FASN | 66\|68\|64 | 198 | 66 | 65\|73\|73 | 0 | 0 | 0 | 0 | 0 | −158.04 | 0.94 | 0.92 |
| Q8NG31-2 | KNL1 | 2\|0\|0 | 2 | 0.67 | 0\|3\|4 | 0 | 0 | 0 | 0 | 0 | −11.76 | 0.29 | 0.92 |
| P00387-2 | CYB5R3 | 4\|4\|4 | 12 | 4 | 5\|5\|4 | 0 | 0 | 0 | 0 | 0 | −13.43 | 0.86 | 0.92 |
| P14618 | PKM | 75\|67\|74 | 216 | 72 | 80\|69\|81 | 0 | 0 | 0 | 0 | 0 | −176.31 | 0.94 | 0.92 |
| P25685 | DNAIB1 | 9\|8\|4 | 21 | 7 | 8\|11\|5 | 0 | 0 | 0 | 0 | 0 | −26.03 | 0.88 | 0.91 |
| P42167 | TMPO | 4\|0\|3 | 7 | 2.33 | 7\|6\|8 | 0 | 0 | 0 | 0 | 0 | −32.34 | 0.33 | 0.92 |
| P42166 | TMPO | 2\|0\|3 | 5 | 1.67 | 6\|5\|7 | 0 | 0 | 0 | 0 | 0 | −27.91 | 0.28 | 0.92 |
| Q14019 | COTL1 | 2\|2\|0 | 4 | 1.33 | 2\|2\|4 | 0 | 0 | 0 | 0 | 0 | −13.39 | 0.5 | 0.92 |
| P62195-2 | PSMC5 | 18\|17\|16 | 51 | 17 | 17\|15\|14 | 0 | 0 | 0 | 0 | 0 | −33.6 | 1.11 | 0.92 |
| Q8NFH3 | NUP43 | 4\|4\|4 | 12 | 4 | 5\|3\|3 | 0 | 0 | 0 | 0 | 0 | −9.88 | 1.09 | 0.88 |
| P18583-5 | SON | 5\|4\|4 | 13 | 4.33 | 12\|14\|8 | 0 | 0 | 0 | 0 | 0 | −39.44 | 0.38 | 0.92 |
| Q9NYK5 | MRPL39 | 5\|4\|0 | 9 | 3 | 4\|5\|6 | 0 | 0 | 0 | 0 | 0 | −23.5 | 0.6 | 0.92 |
| Q96PK6 | RBM14 | 24\|23\|24 | 71 | 23.67 | 23\|24\|23 | 0 | 0 | 0 | 0 | 0 | −51.64 | 1.01 | 0.92 |
| Q9BQE3 | TUBA1C | 81\|68\|73 | 222 | 74 | 71\|68\|73 | 0 | 0 | 0 | 0 | 0 | −153.22 | 1.05 | 0.92 |
| Q8N1G2 | CMTR1 | 2\|2\|2 | 6 | 2 | 5\|4\|5 | 0 | 0 | 0 | 0 | 0 | −16.88 | 0.43 | 0.92 |
| P41091 | EIF253 | 19\|17\|16 | 52 | 17.33 | 17\|22\|18 | C | 0 | 0 | 0 | 0 | −46.67 | 0.91 | 0.92 |
| O60231 | DHX16 | 0\|2\|3 | 5 | 1.67 | 5\|4\|4 | 0 | 0 | 0 | 0 | 0 | −20.61 | 0.38 | 0.92 |
| Q12906-7 | ILF3 | 20\|20\|28 | 68 | 22.67 | 29\|36\|30 | 0 | 0 | 0 | 0 | 0 | −87.49 | 0.72 | 0.92 |
| Q96KK5 | HIST1H2AH | 5\|4\|6 | 15 | 5 | 11\|9\|9 | 0 | 0 | 0 | 0 | 0 | −32.66 | 0.52 | 0.92 |
| Q9BQ39 | DDX50 | 3\|3\|3 | 9 | 3 | 4\|8\|5 | 0 | 0 | 0 | 0 | 0 | −18.8 | 0.53 | 0.92 |
| Q9NYY8 | FASTKD2 | 3\|6\|3 | 12 | 4 | 5\|5\|3 | 0 | 0 | 0 | 0 | 0 | −13.76 | 0.92 | 0.88 |
| P68366-2 | TUBA4A | 72\|61\|67 | 200 | 66.67 | 66\|67\|69 | 0 | 0 | 0 | 0 | 0 | −151.83 | 0.99 | 0.92 |
| Q9NS69 | TOMM22 | 3\|5\|3 | 11 | 3.67 | 3\|2\|7 | 0 | 0 | 0 | 0 | 0 | −12.32 | 0.92 | 0.88 |
| Q16658 | FSCN1 | 14\|9\|10 | 33 | 11 | 12\|10\|21 | 0 | 0 | 0 | 0 | 0 | −40.77 | 0.77 | 0.92 |
| Q9ULD2-2 | MTUS1 | 0\|3\|2 | 5 | 1.67 | 4\|4\|3 | 0 | 0 | 0 | 0 | 0 | −17.71 | 0.45 | 0.92 |
| P13489 | RNH3 | 9\|11\|9 | 29 | 9.67 | 7\|8\|9 | 0 | 0 | 0 | 0 | 0 | −17.91 | 1.21 | 0.9 |
| Q14839 | CHD4 | 6\|7\|8 | 21 | 7 | 13\|16\|14 | 0 | 0 | 0 | 0 | 0 | −47.13 | 0.49 | 0.92 |
| P50402 | EMD | 9\|7\|8 | 24 | 8 | 7\|7\|7 | 0 | 0 | 0 | 0 | 0 | −17.28 | 1.14 | 0.9 |
| Q96GA3 | LTV1 | 9\|7\|7 | 23 | 7.67 | 10\|8\|11 | 0 | 0 | 0 | 0 | 0 | −26.92 | 0.79 | 0.92 |
| P31150 | GDI1 | 4\|6\|6 | 16 | 5.33 | 7\|5\|5 | 0 | 0 | 0 | 0 | 0 | −17.06 | 0.94 | 0.9 |
| Q96EN8 | MOCOS | 8\|5\|6 | 19 | 6.33 | 3\|5\|4 | 0 | 0 | 0 | 0 | 0 | −9.61 | 1.58 | 0.84 |
| P48444 | ARCN1 | 16\|18\|16 | 50 | 16.67 | 16\|16\|15 | 0 | 0 | 0 | 0 | 0 | −34.77 | 1.06 | 0.92 |
| Q9Y4E1-3 | WASHC2C | 2\|3\|0 | 5 | 1.67 | 2\|2\|4 | 0 | 0 | 0 | 0 | 0 | −13.39 | 0.63 | 0.87 |
| Q15233 | NONO | 42\|46\|41 | 129 | 43 | 48\|45\|47 | 0 | 0 | 0 | 0 | 0 | −108.04 | 0.92 | 0.92 |
| P29218 | IMPA1 | 5\|5\|3 | 13 | 4.33 | 5\|4\|6 | 0 | 0 | 0 | 0 | 0 | −16.23 | 0.87 | 0.92 |
| P21796 | VDAC1 | 4\|4\|2 | 10 | 3.33 | 3\|2\|2 | 0 | 0.01 | 0 | 0.01 | 0 | −8.1 | 1.43 | 0.82 |
| P14923 | JUP | 2\|2\|2 | 6 | 2 | 3\|4\|0 | 0 | 0 | 0 | 0 | 0 | −7.93 | 0.86 | 0.92 |
| P35606-2 | COPB2 | 19\|18\|25 | 62 | 20.67 | 14\|22\|14 | 0 | 0 | 0 | 0 | 0 | −35.38 | 1.24 | 0.91 |
| Q9UQ35 | SRRM2 | 5\|5\|9 | 19 | 6.33 | 18\|13\|15 | 0 | 0 | 0 | 0 | 0 | −53.55 | 0.41 | 0.92 |
| O00458 | IFRD1 | 6\|5\|5 | 16 | 5.33 | 4\|4\|4 | 0 | 0 | 0 | 0 | 0 | −9.61 | 1.33 | 0.87 |
| P18463 | HLA-B | 4\|3\|4 | 11 | 3.67 | 4\|3\|3 | 0 | 0 | 0 | 0 | 0 | −10.17 | 1.1 | 0.87 |
| Q9P2R7-2 | SUCLA2 | 5\|7\|5 | 17 | 5.67 | 10\|7\|6 | 0 | 0 | 0 | 0 | 0 | −22.85 | 0.74 | 0.92 |
| P16615 | ATP2A2 | 20\|18\|20 | 58 | 19.33 | 14\|15\|21 | 0 | 0 | 0 | 0 | 0 | −35.4 | 1.16 | 0.92 |
| Q9BRS2 | RIOK1 | 3\|3\|0 | 6 | 2 | 4\|4\|2 | 0 | 0 | 0 | 0 | 0 | −16.24 | 0.6 | 0.92 |
| Q9P0J0 | NDUFA13 | 2\|0\|0 | 2 | 0.67 | 0\|2\|2 | 0 | 0.01 | 0 | 0.01 | 0 | −7.8 | 0.5 | 0.82 |
| Q12972 | PPP1R8 | 3\|3\|3 | 9 | 3 | 5\|3\|5 | 0 | 0 | 0 | 0 | 0 | −13.76 | 0.69 | 0.92 |
| P29144 | TPP2 | 10\|10\|10 | 30 | 10 | 6\|9\|12 | 0 | 0 | 0 | 0 | 0 | −19.98 | 1.11 | 0.91 |
| P19525 | EIF2AK2 | 7\|10\|6 | 23 | 7.67 | 6\|9\|9 | 0 | 0 | 0 | 0 | 0 | −22.37 | 0.96 | 0.91 |
| Q9UKK9 | NUDTS | 5\|5\|6 | 16 | 5.33 | 6\|7\|6 | 0 | 0 | 0 | 0 | 0 | −17.88 | 0.84 | 0.92 |
| Q8IVT2 | MISP | 18\|18\|20 | 56 | 18.67 | 24\|26\|24 | 0 | 0 | 0 | 0 | 0 | −64.38 | 0.76 | 0.92 |
| Q00839-2 | HNRNPU | 29\|31\|29 | 89 | 29.67 | 33\|31\|29 | 0 | 0 | 0 | 0 | 0 | −69.98 | 0.96 | 0.92 |
| P14324-2 | FDPS | 4\|3\|4 | 11 | 3.67 | 6\|5\|5 | 0 | 0 | 0 | 0 | 0 | −17.53 | 0.69 | 0.92 |
| Q00610-2 | CLTC | 25\|24\|26 | 75 | 25 | 28\|26\|29 | 0 | 0 | 0 | 0 | 0 | −65.63 | 0.9 | 0.92 |
| O15355 | PPM1G | 2\|2\|2 | 6 | 2 | 3\|2\|2 | 0 | 0 | 0 | 0 | 0 | −8.1 | 0.86 | 0.92 |
| Q99832 | CCT7 | 24\|21\|22 | 67 | 22.33 | 24\|29\|28 | 0 | 0 | 0 | 0 | 0 | −68.01 | 0.83 | 0.92 |
| P04150-2 | NR3C1 | 3\|4\|2 | 9 | 3 | 2\|2\|3 | 0 | 0.01 | 0 | 0.01 | 0 | −8.1 | 1.29 | 0.83 |
| P01113 | NRAS | 6\|6\|6 | 18 | 6 | 4\|3\|6 | 0 | 0 | 0 | 0 | 0 | −9.36 | 1.38 | 0.88 |
| Q9H2P0 | ADNP | 14\|11\|14 | 39 | 13 | 19\|18\|15 | 0 | 0 | 0 | 0 | 0 | −48.94 | 0.75 | 0.92 |
| P61978-3 | HNRNPK | 38\|36\|31 | 105 | 35 | 35\|43\|39 | 0 | 0 | 0 | 0 | 0 | −95.96 | 0.9 | 0.92 |
| Q13111 | CHAFIA | 9\|8\|11 | 28 | 9.33 | 9\|8\|11 | 0 | 0 | 0 | 0 | 0 | −24.09 | 3 | 0.91 |
| Q8N543 | OGFOD1 | 2\|0\|0 | 2 | 0.67 | 2\|0\|2 | 0 | 0.01 | 0 | 0.01 | 0 | −7.8 | 0.5 | 0.82 |
| P35527 | KRT9 | 44\|33\|52 | 129 | 43 | 50\|39\|35 | 0 | 0 | 0 | 0 | 0 | −101.22 | 1.04 | 0.92 |
| P61978 | HNRNPK | 38\|38\|33 | 109 | 36.33 | 35\|44\|39 | 0 | 0 | 0 | 0 | 0 | −93.94 | 0.92 | 0.92 |
| Q14247 | CTTN | 12\|12\|14 | 38 | 12.67 | 14\|11\|14 | 0 | 0 | 0 | 0 | 0 | −31.17 | 0.97 | 0.92 |
| Q14244 | MAP7 | 40\|32\|39 | 111 | 37 | 31\|27\|37 | 0 | 0 | 0 | 0 | 0 | −67.96 | 1.17 | 0.92 |
| Q14240 | EIF4A2 | 23\|22\|19 | 64 | 21.33 | 21\|29\|27 | 0 | 0 | 0 | 0 | 0 | −66.42 | 0.83 | 0.92 |
| Q81WVX8 | CHERP | 2\|0\|2 | 4 | 1.33 | 6\|5\|7 | 0 | 0 | 0 | 0 | 0 | −42.35 | 0.14 | 0.92 |
| P24928 | POLRZA | 6\|7\|6 | 19 | 6.33 | 5\|5\|7 | 0 | 0 | 0 | 0 | 0 | −14.03 | 1.12 | 0.9 |
| Q5JSZS | PRRC2B | 8\|8\|7 | 23 | 7.67 | 10\|7\|9 | 0 | 0 | 0 | 0 | 0 | −23.23 | 0.88 | 0.92 |
| Q13200 | PSMD2 | 18\|14\|19 | 51 | 17 | 13\|16\|17 | 0 | 0 | 0 | 0 | 0 | −36.52 | 1.11 | 0.92 |
| P63000 | RAC1 | 6\|6\|7 | 19 | 6.33 | 9\|8\|6 | 0 | 0 | 0 | 0 | 0 | −21.17 | 0.83 | 0.92 |
| Q8N163 | CCAR2 | 20\|18\|22 | 60 | 20 | 19\|25\|26 | 0 | 0 | 0 | 0 | 0 | −59.39 | 0.86 | 0.92 |
| Tx0002 | Tx0002 | 71\|632\|65 | 1957 | 652.33 | 42\|671\|68 | 0 | 0 | 0 | 0 | 0 | #NAME? | 0.98 | 0.92 |
| Q15758 | SLC1A5 | 5\|5\|0 | 10 | 3.33 | 4\|4\|5 | 0 | 0 | 0 | 0 | 0 | −20.61 | 0.77 | 0.89 |
| Q8WX93-3 | PALLD | 8\|5\|11 | 24 | 8 | 8\|7\|8 | 0 | 0 | 0 | 0 | 0 | −22.85 | 1.04 | 0.9 |
| Q9NXCS | MIOS | 0\|2\|0 | 2 | 0.67 | 2\|2\|0 | 0 | 0.01 | 0 | 0.01 | 0 | −7.8 | 0.5 | 0.82 |
| O14617-3 | AP3D1 | 3\|4\|3 | 10 | 3.33 | 2\|2\|5 | 0 | 0 | 0 | 0 | 0 | −8.99 | 1.11 | 0.87 |
| P15170-2 | GSPT1 | 4\|3\|5 | 12 | 4 | 6\|8\|7 | 0 | 0 | 0 | 0 | 0 | −24.06 | 0.57 | 0.92 |
| O15427 | SLC16A3 | 3\|4\|2 | 9 | 3 | 3\|2\|4 | 0 | 0 | 0 | 0 | 0 | −10.4 | 1 | 0.87 |
| Q9NWB6 | ARGLU1 | 3\|2\|2 | 7 | 2.33 | 4\|3\|3 | 0 | 0 | 0 | 0 | 0 | −11.71 | 0.7 | 0.92 |
| Q16795 | NDUFA9 | 4\|3\|2 | 9 | 3 | 5\|5\|4 | 0 | 0 | 0 | 0 | 0 | −16.88 | 0.64 | 0.92 |
| P62280 | RPS11 | 14\|13\|17 | 44 | 14.67 | 17\|11\|13 | 0 | 0 | 0 | 0 | 0 | −32.08 | 1.07 | 0.91 |
| P27816-4 | MAP4 | 11\|11\|12 | 34 | 11.33 | 23\|14\|15 | 0 | 0 | 0 | 0 | 0 | −48.88 | 0.65 | 0.92 |
| Q9BTX1-6 | NDC1 | 2\|0\|0 | 2 | 0.67 | 3\|3\|0 | 0 | 0 | 0 | 0 | 0 | −10.34 | 0.33 | 0.92 |
| Q6ZW31-2 | SYDE1 | 0\|2\|0 | 2 | 0.67 | 2\|4\|0 | 0 | 0 | 0 | 0 | 0 | −10.2 | 0.33 | 0.92 |
| Q96RP9 | GFM1 | 6\|8\|8 | 22 | 7.33 | 8\|7\|9 | 0 | 0 | 0 | 0 | 0 | −22.37 | 0.92 | 0.92 |
| O60488-2 | ACSL4 | 4\|2\|3 | 9 | 3 | 3\|4\|2 | 0 | 0 | 0 | 0 | 0 | −10.42 | 1 | 0.87 |
| O95235-2 | KIF20A | 2\|4\|3 | 9 | 3 | 4\|8\|6 | 0 | 0 | 0 | 0 | 0 | −22.21 | 0.5 | 0.92 |
| P61158 | ACTR3 | 5\|7\|4 | 16 | 5.33 | 11\|7\|9 | 0 | 0 | 0 | 0 | 0 | −29.96 | 0.59 | 0.92 |
| P56134-4 | ATPSJ2 | 4\|4\|4 | 12 | 4 | 5\|4\|3 | 0 | 0 | 0 | 0 | 0 | −11.06 | 1 | 0.92 |
| O95602 | POLRIA | 13\|4\|5 | 22 | 7.33 | 7\|7\|7 | 0 | 0 | 0 | 0 | 0 | −22.08 | 1.05 | 0.88 |
| Q9H832 | UBE2Z | 0\|0\|3 | 3 | 3 | 4\|2\|2 | 0 | 0 | 0 | 0 | 0 | −13.39 | 0.38 | 0.87 |
| O94776 | MTA2 | 18\|19\|17 | 54 | 18 | 16\|15\|16 | 0 | 0 | 0 | 0 | 0 | −33.33 | 1.15 | 0.92 |
| Q15382 | RHEB | 5\|6\|4 | 15 | 5 | 6\|4\|3 | 0 | 0 | 0 | 0 | 0 | −12.24 | 1.15 | 0.88 |
| P62191 | PSMC1 | 11\|6\|12 | 29 | 9.67 | 11\|12\|11 | 0 | 0 | 0 | 0 | 0 | −35.15 | 0.85 | 0.91 |
| P11413 | G6PD | 10\|10\|11 | 31 | 10.33 | 11\|12\|11 | 0 | 0 | 0 | 0 | 0 | −28.23 | 0.91 | 0.92 |
| P12036-2 | NEFH | 3\|2\|3 | 8 | 2.67 | 3\|2\|2 | 0 | 0 | 0 | 0 | 0 | −8.1 | 1.14 | 0.85 |
| P11142 | HSPA8 | 50\|55\|52 | 157 | 52.33 | 62\|51\|54 | 0 | 0 | 0 | 0 | 0 | −126.65 | 0.94 | 0.92 |
| Q9BVP2-2 | GNL3 | 2\|5\|3 | 10 | 3.33 | 6\|7\|5 | 0 | 0 | 0 | 0 | 0 | −22.21 | 0.56 | 0.92 |
| Q13501-2 | SQSTM1 | 11\|10\|11 | 32 | 10.67 | 9\|7\|7 | 0 | 0 | 0 | 0 | 0 | −15.32 | 1.39 | 0.9 |
| P30492 | HLA-B | 4\|3\|4 | 1.1 | 3.67 | 4\|3\|3 | 0 | 0 | 0 | 0 | 0 | −10.17 | 1.1 | 0.87 |
| P30493 | HLA-B | 4\|3\|4 | 11 | 3.67 | 4\|3\|3 | 0 | 0 | 0 | 0 | 0 | −10.17 | 1.1 | 0.87 |
| P61081 | UBE2M | 8\|6\|8 | 22 | 7.33 | 8\|6\|6 | 0 | 0 | 0 | 0 | 0 | −17.57 | 1.1 | 0.9 |
| P62266 | RPS23 | 2\|2\|2 | 6 | 2 | 4\|3\|3 | 0 | 0 | 0 | 0 | 0 | −11.71 | 0.6 | 0.92 |
| P62263 | RPS14 | 19\|20\|18 | 57 | 19 | 20\|16\|18 | 0 | 0 | 0 | 0 | 0 | −40.1 | 1.06 | 0.92 |
| Q16513-3 | PKN2 | 0\|0\|2 | 2 | 0.67 | 2\|3\|0 | 0 | 0 | 0 | 0 | 0 | −9.13 | 0.4 | 0.84 |
| P62269 | RPS18 | 6\|6\|5 | 17 | 5.67 | 4\|3\|6 | 0 | 0 | 0 | 0 | 0 | −10.78 | 1.31 | 0.88 |
| Q9BR76 | CORO1B | 3\|2\|4 | 9 | 3 | 3\|3\|2 | 0 | 0 | 0 | 0 | 0 | −9.29 | 1.12 | 0.85 |
| O08945 | SSRP1 | 3\|4\|5 | 1.2 | 4 | 9\|5\|4 | 0 | 0 | 0 | 0 | 0 | −20.13 | 0.67 | 0.92 |
| P20339-2 | RAB5A | 7\|4\|7 | 18 | 6 | 4\|6\|7 | 0 | 0 | 0 | 0 | 0 | −17.06 | 1.06 | 0.9 |
| Q96C36 | PYCR2 | 2\|3\|0 | 5 | 1.67 | 3\|2\|3 | 0 | 0 | 0 | 0 | 0 | −13.39 | 0.63 | 0.87 |
| P07195 | LDHB | 10\|10\|11 | 31 | 10.33 | 11\|12\|12 | 0 | 0 | 0 | 0 | 0 | −29.43 | 0.89 | 0.92 |
| O00330 | PDHX | 2\|3\|3 | 8 | 2.67 | 4\|0\|3 | 0 | 0 | 0 | 0 | 0 | −7.93 | 1.14 | 0.85 |
| P53992 | SEC24C | 5\|7\|10 | 22 | 7.33 | 5\|6\|9 | 0 | 0 | 0 | 0 | 0 | −19.11 | 1.1 | 0.9 |
| Q9NTJ3 | SMC4 | 12\|9\|15 | 36 | 12 | 10\|12\|7 | 0 | 0 | 0 | 0 | 0 | −23.79 | 1.24 | 0.9 |
| O95163 | IKBKAP | 4\|7\|4 | 15 | 5 | 3\|4\|3 | 0 | 0.01 | 0 | 0.01 | 0 | −8.71 | 1.5 | 0.82 |
| Q9NXV6 | CDKN2AIP | 5\|5\|6 | 16 | 5.33 | 2\|7\|6 | 0 | 0 | 0 | 0 | 0 | −13.07 | 1.07 | 0.89 |
| P13639 | EEF2 | 87\|80\|85 | 252 | 84 | 85\|75\|83 | 0 | 0 | 0 | 0 | 0 | −172.2 | 1.04 | 0.92 |
| P52907 | CAPZA1 | 7\|7\|4 | 18 | 6 | 6\|6\|4 | 0 | 0 | 0 | 0 | 0 | −15.82 | 1.12 | 0.89 |
| P62841 | RPS15 | 7\|4\|10 | 21 | 7 | 5\|6\|7 | 0 | 0 | 0 | 0 | 0 | −18.27 | 1.17 | 0.88 |
| Q9GZL7 | WDR12 | 6\|5\|6 | 17 | 5.67 | 4\|8\|7 | 0 | 0 | 0 | 0 | 0 | −17.88 | 0.89 | 0.92 |
| Q86UV5-2 | USP48 | 2\|0\|0 | 2 | 0.67 | 2\|2\|2 | 0 | 0 | 0 | 0 | 0 | −10.44 | 0.33 | 0.92 |
| P15880 | RPS2 | 11\|14\|14 | 39 | 13 | 11\|12\|12 | 0 | 0 | 0 | 0 | 0 | −27.93 | 1.11 | 0.91 |
| Q9BXS5 | AP1M1 | 5\|8\|7 | 20 | 6.67 | 6\|8\|8 | 0 | 0 | 0 | 0 | 0 | −21.58 | 0.91 | 0.91 |
| Q86XP3-2 | DDX42 | 0\|2\|0 | 2 | 0.67 | 2\|2\|0 | 0 | 0.01 | 0 | 0.01 | 0 | −7.8 | 0.5 | 0.82 |
| P55809 | OXCT1 | 13\|14\|13 | 40 | 13.33 | 13\|18\|17 | 0 | 0 | 0 | 0 | 0 | −40.47 | 0.83 | 0.92 |
| P53985 | SLC16A1 | 5\|6\|7 | 18 | 6 | 5\|4\|5 | 0 | 0 | 0 | 0 | 0 | −11.96 | 1.29 | 0.88 |
| P08195-2 | SLC3A2 | 21\|19\|15 | 55 | 18.33 | 19\|23\|21 | 0 | 0 | 0 | 0 | 0 | −55.75 | 0.87 | 0.92 |
| O99829 | CPNE1 | 6\|5\|6 | 17 | 5.67 | 9\|9\|10 | 0 | 0 | 0 | 0 | 0 | −29.27 | 0.61 | 0.92 |
| P08243-2 | ASNS | 10\|9\|12 | 31 | 10.33 | 13\|12\|19 | 0 | 0 | 0 | 0 | 0 | −42.38 | 0.7 | 0.92 |
| P78527 | PRKDC | 23\|15\|26 | 64 | 21.33 | 16\|20\|26 | 0 | 0 | 0 | 0 | 0 | −54.51 | 1.03 | 0.92 |
| Q92747 | ARPCIA | 3\|2\|0 | 5 | 1.67 | 3\|2\|3 | 0 | 0 | 0 | 0 | 0 | −13.39 | 0.63 | 0.87 |
| P11908 | PRPS2 | 5\|7\|7 | 19 | 6.33 | 4\|7\|8 | 0 | 0 | 0 | 0 | 0 | −17.88 | 1 | 0.9 |
| Q6ULP2-8 | \|AFTPH | 5\|3\|4 | 12 | 4 | 6\|7\|6 | 0 | 0 | 0 | 0 | 0 | −21.43 | 0.63 | 0.92 |
| Q99873-2 | PRMT1 | 7\|4\|5 | 16 | 5.33 | 9\|5\|3 | 0 | 0 | 0 | 0 | 0 | −16.94 | 0.94 | 0.9 |
| P31153 | MAT2A | 8\|10\|9 | 27 | 9 | 9\|10\|8 | 0 | 0 | 0 | 0 | 0 | −22.87 | 1 | 0.91 |
| P52565 | ARHGDIA | 10\|9\|11 | 30 | 10 | 8\|11\|10 | 0 | 0 | 0 | 0 | 0 | −23.79 | 1.03 | 0.91 |
| P27448-8 | MARK3 | 4\|0\|2 | 6 | 2 | 5\|4\|3 | 0 | 0 | 0 | 0 | 0 | −19.11 | 0.5 | 0.92 |
| P57088 | TMEM33 | 4\|3\|0 | 7 | 2.33 | 4\|5\|2 | 0 | 0 | 0 | 0 | 0 | −17.71 | 0.64 | 0.89 |
| P61981 | YWHAG | 9\|7\|11 | 27 | 9 | 11\|11\|16 | 0 | 0 | 0 | 0 | 0 | −38.42 | 0.71 | 0.92 |
| Q9UM54-6 | MYO6 | 15\|11\|19 | 45 | 15 | 28\|29\|28 | 0 | 0 | 0 | 0 | 0 | −92.84 | 0.53 | 0.92 |
| Q5VTR2 | RNF20 | 3\|3\|3 | 9 | 3 | 6\|5\|8 | 0 | 0 | 0 | 0 | 0 | −21.43 | 0.47 | 0.92 |
| Q9UJS0 | SLC25A13 | 13\|13\|16 | 42 | 14 | 12\|14\|16 | 0 | 0 | 0 | 0 | 0 | −33.25 | 1 | 0.92 |
| Q96GD4-4 | AURKB | 0\|0\|3 | 3 | 1 | 3\|0\|2 | 0 | 0.01 | 0 | 0.01 | 0 | −9.13 | 0.6 | 0.81 |
| Q02543 | RPL18A | 8\|8\|7 | 23 | 7.67 | 10\|6\|9 | 0 | 0 | 0 | 0 | 0 | −22.02 | 0.92 | 0.92 |
| Q05639 | EEF1A2 | 25\|23\|22 | 70 | 23.33 | 27\|25\|25 | 0 | 0 | 0 | 0 | 0 | −61.5 | 0.91 | 0.92 |
| Q6P2E9 | EDC4 | 5\|2\|3 | 10 | 3.33 | 3\|4\|4 | 0 | 0 | 0 | 0 | 0 | −12.99 | 0.91 | 0.88 |
| Q99567 | NUP88 | 5\|6\|9 | 20 | 6.67 | 5\|9\|9 | 0 | 0 | 0 | 0 | 0 | −22.85 | 0.87 | 0.91 |
| P49189 | ALDH9A1 | 7\|3\|4 | 14 | 4.67 | 8\|6\|8 | 0 | 0 | 0 | 0 | 0 | −25.42 | 0.64 | 0.92 |
| Q9Y570 | PPME1 | 2\|3\|0 | 5 | 1.67 | 3\|0\|4 | 0 | 0 | 0 | 0 | 0 | −11.76 | 0.71 | 0.85 |
| P39656-3 | DDOST | 0\|3\|3 | 6 | 2 | 3\|2\|2 | 0 | 0 | 0 | 0 | 0 | −11.93 | 0.86 | 0.85 |
| Q9NUQ8 | ABCF3 | 4\|3\|4 | 11 | 3.67 | 3\|3\|4 | 0 | 0 | 0 | 0 | 0 | −10.17 | 1.1 | 0.87 |
| P33176 | KIFSB | 15\|18\|24 | 57 | 19 | 20\|17\|18 | 0 | 0 | 0 | 0 | 0 | −45.83 | 1.04 | 0.92 |
| O43390-4 | HNRNPR | 4\|0\|2 | 6 | 2 | 3\|3\|3 | 0 | 0 | 0 | 0 | 0 | −14.75 | 0.67 | 0.87 |
| P63104 | YWHAZ | 10\|5\|6 | 21 | 7 | 9\|7\|8 | 0 | 0 | 0 | 0 | 0 | −24.09 | 0.88 | 0.91 |
| Q13309 | SKP2 | 3\|0\|2 | 5 | 1.67 | 3\|4\|4 | 0 | 0 | 0 | 0 | 0 | −17.71 | 0.45 | 0.92 |
| Q9ULX3 | NOB1 | 6\|6\|5 | 17 | 5.67 | 4\|5\|4 | 0 | 0 | 0 | 0 | 0 | −10.78 | 1.31 | 0.88 |
| P29692-3 | EEFID | 11\|10\|13 | 34 | 11.33 | 7\|8\|8 | 0 | 0 | 0 | 0 | 0 | −15.32 | 1.48 | 0.89 |
| Q14677 | CLINT1 | 2\|4\|4 | 10 | 3.33 | 4\|5\|5 | 0 | 0 | 0 | 0 | 0 | −16.88 | 0.71 | 0.92 |
| Q96RQ3 | MCCC1 | 10\|109\|10 | 326 | 108.67 | 07\|13\|10 | 0 | 0 | 0 | 0 | 0 | −230.55 | 1 | 0.92 |
| P40692 | MLH1 | 2\|0\|4 | 6 | 2 | 7\|3\|4 | 0 | 0 | 0 | 0 | 0 | −22.08 | 0.43 | 0.92 |
| Q12906 | ILF3 | 20\|21\|28 | 69 | 23 | 29\|37\|29 | 0 | 0 | 0 | 0 | 0 | −87.49 | 0.73 | 0.92 |
| Q99623 | PHB2 | 7\|6\|5 | 18 | 6 | 8\|6\|9 | 0 | 0 | 0 | 0 | 0 | −22.85 | 0.78 | 0.92 |
| Q9H0B6-2 | KLC2 | 5\|3\|3 | 11 | 3.67 | 2\|3\|3 | 0 | 0.01 | 0 | 0.01 | 0 | −7.81 | 1.38 | 0.83 |
| Q7Z2W4 | ZC3HAV1 | 21\|14\|18 | 53 | 17.67 | 16\|13\|21 | 0 | 0 | 0 | 0 | 0 | −41.33 | 1.06 | 0.92 |
| P04406 | GAPDH | 38\|34\|32 | 104 | 34.67 | 37\|36\|30 | 0 | 0 | 0 | 0 | 0 | −77.39 | 1.01 | 0.92 |
| P61764 | STXBP1 | 2\|2\|3 | 7 | 2.33 | 4\|2\|2 | 0 | 0 | 0 | 0 | 0 | −9.29 | 0.88 | 0.87 |
| P11177-2 | PDHB | 11\|9\|11 | 31 | 10.33 | 7\|12\|8 | 0 | 0 | 0 | 0 | 0 | −21.43 | 1.15 | 0.91 |
| P55039 | DRG2 | 6\|6\|7 | 19 | 6.33 | 4\|5\|5 | 0 | 0 | 0 | 0 | 0 | −10.52 | 1.36 | 0.88 |
| P55036 | PSMD4 | 2\|3\|2 | 7 | 2.33 | 0\|2\|4 | 0 | 0.01 | 0 | 0.01 | 0 | −6.67 | 1.17 | 0.83 |
| O9NSD9 | FARSB | 10\|11\|11 | 32 | 10.67 | 11\|11\|9 | 0 | 0 | 0 | 0 | 0 | −24.68 | 1.03 | 0.91 |
| PS2298-3 | NCBP2 | 0\|0\|3 | 3 | 1 | 2\|0\|3 | 0 | 0.01 | 0 | 0.01 | 0 | −9.13 | 0.6 | 0.81 |
| Q13490-2 | BIRC2 | 9\|3\|8 | 20 | 6.67 | 7\|7\|8 | 0 | 0 | 0 | 0 | 0 | −25.42 | 0.91 | 0.9 |
| Q9NZI8 | GF2BP1 | 9\|6\|7 | 22 | 7.33 | 11\|8\|8 | 0 | 0 | 0 | 0 | 0 | −26.11 | 0.81 | 0.92 |
| P62070 | RRAS2 | 2\|3\|3 | 8 | 2.67 | 2\|2\|3 | 0 | 0 | 0 | 0 | 0 | −8.1 | 1.14 | 0.85 |
| Q92769-3 | HDAC2 | 7\|6\|11 | 24 | 8 | 5\|10\|6 | 0 | 0 | 0 | 0 | 0 | −18.72 | 1.14 | 0.89 |
| P62277 | RPS13 | 3\|4\|4 | 11 | 3.67 | 5\|5\|3 | 0 | 0 | 0 | 0 | 0 | −13.76 | 0.85 | 0.92 |
| Q9UJV9 | DDX41 | 4\|2\|3 | 9 | 3 | 6\|4\|5 | 0 | 0 | 0 | 0 | 0 | −18.16 | 0.6 | 0.92 |
| Q96EP5-2 | DAZAP1 | 3\|0\|2 | 5 | 1.67 | 2\|2\|3 | 0 | 0 | 0 | 0 | 0 | −11.93 | 0.71 | 0.86 |
| Q53GS9 | USP39 | 5\|2\|4 | 11 | 3.67 | 2\|5\|4 | 0 | 0 | 0 | 0 | 0 | −12.99 | 1 | 0.88 |
| P05023 | ATPIA1 | 7\|8\|6 | 21 | 7 | 6\|7\|7 | 0 | 0 | 0 | 0 | 0 | −17.57 | 1.05 | 0.9 |
| Q5T6F2 | UBAP2 | 3\|6\|4 | 13 | 4.33 | 5\|4\|3 | 0 | 0 | 0 | 0 | 0 | −12.5 | 1.08 | 0.87 |
| Q07065 | CKAP4 | 47\|44\|48 | 139 | 46.33 | 48\|49\|47 | 0 | 0 | 0 | 0 | 0 | −108.22 | 0.97 | 0.92 |
| O75694-2 | NUP155 | 2\|2\|3 | 7 | 2.33 | 4\|3\|4 | 0 | 0 | 0 | 0 | 0 | −12.99 | 0.64 | 0.92 |
| P50990 | CCT8 | 33\|29\|30 | 92 | 30.67 | 42\|50\|44 | 0 | 0 | 0 | 0 | 0 | −123.46 | 0.68 | 0.92 |
| Q9UBF8-2 | PI4KB | 2\|0\|2 | 4 | 1.33 | 2\|2\|2 | 0 | 0 | 0 | 0 | 0 | −10.44 | 0.67 | 0.92 |
| Q16401-2 | PSMD5 | 2\|0\|2 | 4 | 1.33 | 3\|0\|3 | 0 | 0 | 0 | 0 | 0 | −10.34 | 0.67 | 0.92 |
| P31040 | SDHA | 13\|13\|16 | 42 | 14 | 20\|17\|19 | 0 | 0 | 0 | 0 | 0 | −50.44 | 0.75 | 0.92 |
| P51153 | RAB13 | 4\|5\|5 | 14 | 4.67 | 6\|5\|5 | 0 | 0 | 0 | 0 | 0 | −15.82 | 0.88 | 0.92 |
| P51151 | RAB9A | 4\|2\|5 | 11 | 3.67 | 3\|3\|3 | 0 | 0 | 0 | 0 | 0 | −10.42 | 1.22 | 0.85 |
| Q96124 | FUBP3 | 5\|5\|8 | 18 | 6 | 5\|6\|5 | 0 | 0 | 0 | 0 | 0 | −14.32 | 1.12 | 0.89 |
| O00303 | EIF3F | 11\|10\|10 | 31 | 10.33 | 11\|12\|11 | 0 | 0 | 0 | 0 | 0 | −28.23 | 0.91 | 0.92 |
| P02786 | TFRC | 4\|3\|3 | 10 | 3.33 | 0\|3\|4 | 0 | 0.01 | 0 | 0.01 | 0 | −6.41 | 1.43 | 0.82 |
| O14579 | COPE | 7\|9\|6 | 22 | 7.33 | 8\|10\|7 | 0 | 0 | 0 | 0 | 0 | −23.63 | 0.88 | 0.91 |
| Q9UL25 | RAB21 | 4\|4\|6 | 14 | 4.67 | 5\|7\|4 | 0 | 0 | 0 | 0 | 0 | −15.82 | 0.88 | 0.9 |
| P0DMV9 | HSPA1B | 53\|43\|41 | 137 | 45.67 | 46\|41\|40 | 0 | 0 | 0 | 0 | 0 | −92.5 | 1.08 | 0.92 |
| P18621 | RPL17 | 6\|7\|7 | 20 | 6.67 | 5\|5\|8 | 0 | 0 | 0 | 0 | 0 | −15.21 | 1.11 | 0.9 |
| P62854 | RPS26 | 4\|4\|5 | 13 | 4.33 | 5\|5\|7 | 0 | 0 | 0 | 0 | 0 | −17.06 | 0.76 | 0.92 |
| P52597 | HNRNPF | 26\|27\|27 | 80 | 26.67 | 28\|31\|32 | 0 | 0 | 0 | 0 | 0 | −72.19 | 0.88 | 0.92 |
| P17655 | CAPN2 | 5\|4\|5 | 14 | 4.67 | 7\|10\|6 | 0 | 0 | 0 | 0 | 0 | −24.7 | 0.61 | 0.92 |
| P09211 | GSTP1 | 4\|4\|7 | 15 | 5 | 5\|5\|4 | 0 | 0 | 0 | 0 | 0 | −13.43 | 1.07 | 0.88 |
| Q13310-2 | PABPC4 | 2\|0\|3 | 5 | 1.67 | 2\|3\|4 | 0 | 0 | 0 | 0 | 0 | −14.75 | 0.56 | 0.92 |
| Q9BZX2 | UCK2 | 2\|2\|2 | 6 | 2 | 5\|4\|3 | 0 | 0 | 0 | 0 | 0 | −14.21 | 0.5 | 0.92 |
| A1X283 | SH3PXD2B | 8\|3\|6 | 17 | 5.67 | 7\|6\|6 | 0 | 0 | 0 | 0 | 0 | −21.43 | 0.89 | 0.9 |
| Q9H974-2 | QTRT2 | 3\|4\|3 | 10 | 3.33 | 2\|4\|4 | 0 | 0 | 0 | 0 | 0 | −10.17 | 1 | 0.88 |
| Q15020 | SART3 | 6\|7\|8 | 21 | 7 | 13\|4\|6 | 0 | 0 | 0 | 0 | 0 | −20.78 | 0.91 | 0.91 |
| Q9Y277 | VDAC3 | 6\|7\|6 | 19 | 6.33 | 8\|8\|8 | 0 | 0 | 0 | 0 | 0 | −22.37 | 0.79 | 0.92 |
| Q14914-2 | PTGR1 | 4\|5\|9 | 18 | 6 | 2\|3\|7 | 0 | 0.01 | 0 | 0.01 | 0 | −10.89 | 1.5 | 0.82 |
| P63092-3 | GNAS | 4\|3\|3 | 10 | 3.33 | 3\|4\|4 | 0 | 0 | 0 | 0 | 0 | −11.36 | 0.91 | 0.89 |
| P30453 | HLA-A | 3\|4\|4 | 11 | 3.67 | 5\|3\|0 | 0 | 0 | 0 | 0 | 0 | −7.46 | 1.38 | 0.84 |
| P35610 | SOAT1 | 3\|2\|2 | 7 | 2.33 | 2\|2\|3 | 0 | 0 | 0 | 0 | 0 | −8.1 | 1 | 0.86 |
| P00403 | MT-CO2 | 2\|2\|3 | 7 | 2.33 | 4\|4\|2 | 0 | 0 | 0 | 0 | 0 | −11.71 | 0.7 | 0.92 |
| P17812 | CTPS1 | 12\|10\|11 | 33 | 11 | 11\|9\|10 | 0 | 0 | 0 | 0 | 0 | −23.5 | 1.1 | 0.91 |
| 45880-2 | VDAC2 | 2\|4\|5 | 11 | 3.67 | 4\|3\|5 | 0 | 0 | 0 | 0 | 0 | −14.21 | 0.92 | 0.88 |
| Q64102-2 | WASHC2A | 2\|3\|0 | 5 | 1.67 | 2\|3\|5 | 0 | 0 | 0 | 0 | 0 | −16.24 | 0.5 | 0.92 |
| P08670 | VIM | 68\|70\|69 | 207 | 69 | 74\|76 \|70 | 0 | 0 | 0 | 0 | 0 | −162.73 | 0.94 | 0.92 |
| P32969 | RPL9P8; | 12\|8\|9 | 29 | 9.67 | 9 \|13 \|21 | 0 | 0 | 0 | 0 | 0 | −42.62 | 0.67 | 0.92 |
| | RPL9; | | | | | | | | | | | | |
| | RPL91 | | | | | | | | | | | | |
| Q13177 | PAK2 | 5\|4\|6 | 15 | 5 | 6\|7\|7 | 0 | 0 | 0 | 0 | 0 | −20.83 | 0.75 | 0.92 |
| O43747 | AP1G1 | 0\|2\|0 | 2 | 0.67 | 2\|0\|2 | 0 | 0.01 | 0 | 0.01 | 0 | −7.8 | 0.5 | 0.82 |
| P42224 | STATI | 6\|8\|8 | 22 | 7.33 | 14\|8\|9 | 0 | 0 | 0 | 0 | 0 | −31.24 | 0.71 | 0.92 |
| P22234 | PAICS | 13\|13\|17 | 43 | 14.33 | 15\|14\|12 | 0 | 0 | 0 | 0 | 0 | −32.08 | 1.05 | 0.91 |
| P04792 | HSPB1 | 17\|19\|18 | 54 | 18 | 18\|20\|15 | 0 | 0 | 0 | 0 | 0 | −40.37 | 1.02 | 0.92 |
| O43684-2 | BUB3 | 13\|10\|11 | 34 | 11.33 | 16\|13\|11 | 0 | 0 | 0 | 0 | 0 | −35.55 | 0.85 | 0.92 |
| Q09666 | AHNAK | 25\|137\|13 | 393 | 131 | 09\|239\|21 | 0 | 0 | 0 | 0 | 0 | −621.06 | 0.59 | 0.92 |
| Q15424-2 | ISAFB | 2\|4\|4 | 10 | 3.33 | 9\|7\|9 | 0 | 0 | 0 | 0 | 0 | −31.91 | 0.4 | 0.92 |
| O15091-2 | KIAA0391 | 2\|0\|0 | 2 | 0.67 | 0\|2\|2 | 0 | 0.01 | 0 | 0.01 | 0 | −7.8 | 0.5 | 0.82 |
| P55209-3 | NAP1L1 | 3\|3\|3 | 9 | 3 | 0\|3\|3 | 0 | 0 | 0 | 0 | 0 | −5.36 | 1.5 | 0.81 |
| P14625 | HSP9081 | 7\|6\|6 | 19 | 6.33 | 7\|6\|6 | 0 | 0 | 0 | 0 | 0 | −16.39 | 3 | 0.9 |
| P62140 | PPP1CB | 11\|9\|9 | 29 | 9.67 | 7\|9\|9 | 0 | 0 | 0 | 0 | 0 | −19.08 | 1.16 | 0.91 |
| P13929-3 | ENO3 | 3\|3\|6 | 12 | 4 | 3\|6\|6 | 0 | 0 | 0 | 0 | 0 | −16.23 | 0.8 | 0.89 |
| Q6UWE0 | LRSAM1 | 5\|3\|3 | 11 | 3.67 | 9\|11\|5 | 0 | 0 | 0 | 0 | 0 | −29.52 | 0.44 | 0.92 |
| Q969U7-2 | PSMG2 | 4\|4\|4 | 12 | 4 | 4\|4\|3 | 0 | 0 | 0 | 0 | 0 | −9.88 | 1.09 | 0.88 |
| Q9P0J7 | KCMF1 | 414\|4 | 12 | 4 | 0\|4\|5 | 0 | 0 | 0 | 0 | 0 | −7.2 | 1.33 | 0.85 |
| Q96584-4 | SRPK1 | 4\|3\|5 | 12 | 4 | 4\|3\|5 | 0 | 0 | 0 | 0 | 0 | −12.5 | 1 | 0.88 |
| Q86TX2 | ACOT1 | 0\|0\|3 | 3 | 1 | 4\|3\|2 | 0 | 0 | 0 | 0 | 0 | −14.75 | 0.33 | 0.92 |
| O95573 | ACSL3 | 15\|11\|14 | 40 | 13.33 | 13\|11\|9 | 0 | 0 | 0 | 0 | 0 | −25.58 | 1.21 | 0.91 |
| P09651-3 | HNRNPA1 | 10\|7\|5 | 22 | 7.33 | 6\|8\|12 | 0 | 0 | 0 | 0 | 0 | −26.74 | 0.85 | 0.91 |
| O14979 | HNRNPDL | 5\|5\|4 | 14 | 4.67 | 6\|5\|8 | 0 | 0 | 0 | 0 | 0 | −19.55 | 0.74 | 0.92 |
| Q8WUM0 | NUP133 | 4\|5\|3 | 12 | 4 | 6\|7\|6 | 0 | 0 | 0 | 0 | 0 | −21.43 | 0.63 | 0.92 |
| P07237 | P4HB | 3\|2\|0 | 5 | 1.67 | 2\|4\|3 | 0 | 0 | 0 | 0 | 0 | −14.75 | 0.56 | 0.92 |
| P47756-2 | CAPZB | 9\|9\|10 | 28 | 9.33 | 13\|7\|11 | 0 | 0 | 0 | 0 | 0 | −26.16 | 0.9 | 0.92 |
| Q9H9A6 | LRRC40 | 12\|11\|9 | 32 | 10.67 | 14\|7\|11 | 0 | 0 | 0 | 0 | 0 | −27.4 | 1 | 0.91 |
| P11387 | TOP1 | 4\|5\|5 | 14 | 4.67 | 7\|4\|4 | 0 | 0 | 0 | 0 | 0 | −14.57 | 0.93 | 0.92 |
| Q9UG63 | ABCF2 | 10\|17\|15 | 42 | 14 | 10\|13\|11 | 0 | 0 | 0 | 0 | 0 | −28.23 | 1.24 | 0.91 |
| Q14683 | SMC1A | 11\|14\|9 | 34 | 11.33 | 8\|10\|6 | 0 | 0 | 0 | 0 | 0 | −17.91 | 1.42 | 0.89 |
| P04899 | GNA12 | 4\|4\|4 | 12 | 4 | 4\|4\|3 | 0 | 0 | 0 | 0 | 0 | −9.88 | 1.09 | 0.88 |
| P06493 | CDK1 | 12\|11\|9 | 32 | 10.67 | 9\|11\|6 | 0 | 0 | 0 | 0 | 0 | −20.25 | 1.23 | 0.91 |
| O43491-4 | EPB41L2 | 7\|3\|0 | 10 | 3.33 | 4\|3\|4 | 0 | 0 | 0 | 0 | 0 | −17.71 | 0.91 | 0.85 |
| P62847-2 | RPS24 | 5\|5\|5 | 15 | 5 | 7\|4\|6 | 0 | 0 | 0 | 0 | 0 | −15.5 | 0.88 | 0.92 |
| P05787 | KRT8 | 46\|44\|48 | 138 | 46 | 47\|56\|53 | 0 | 0 | 0 | 0 | 0 | −122.73 | 0.88 | 0.92 |
| P05783 | KRT18 | 38\|32\|29 | 99 | 33 | 34\|41\|34 | 0 | 0 | 0 | 0 | 0 | −89.39 | 0.91 | 0.92 |
| P11166 | SLC2A1 | 3\|3\|4 | 10 | 3.33 | 4\|2\|2 | 0 | 0 | 0 | 0 | 0 | −7.81 | 1.25 | 0.85 |
| O9Y520-4 | PRRC2C | 7\|6\|12 | 25 | 8.33 | 11\|5\|12 | 0 | 0 | 0 | 0 | 0 | −27.29 | 0.89 | 0.91 |
| P47914 | RPL29 | 5\|5\|5 | 15 | 5 | 4\|4\|4 | 0 | 0 | 0 | 0 | 0 | −9.61 | 1.25 | 0.88 |
| Q8WX19 | GATAD2B | 4\|3\|7 | 14 | 4.67 | 5\|4\|5 | 0 | 0 | 0 | 0 | 0 | −15.01 | 1 | 0.88 |
| Q9NVM9 | INTS13 | 0\|3\|3 | 6 | 2 | 4\|2\|2 | 0 | 0 | 0 | 0 | 0 | −13.39 | 0.75 | 0.86 |
| O43318-2 | MAP3K7 | 3\|0\|2 | 5 | 1.67 | 4\|4\|4 | 0 | 0 | 0 | 0 | 0 | −13.22 | 0.63 | 0.87 |
| P61513 | RPL37A | 2\|2\|3 | 7 | 2.33 | 3\|2\|3 | 0 | 0 | 0 | 0 | 0 | −9.29 | 0.88 | 0.87 |
| Q9UBQ0 | VPS29 | 0\|0\|2 | 2 | 0.67 | 2\|2\|2 | 0 | 0 | 0 | 0 | 0 | −10.44 | 0.33 | 0.92 |
| Q9NR45 | NANS | 2\|4\|4 | 10 | 3.33 | 3\|2\|3 | 0 | 0 | 0 | 0 | 0 | −9.29 | 1.25 | 0.85 |
| Q9NQT5-2 | EXOSC3 | 2\|2\|2 | 6 | 2 | 3\|2\|3 | 0 | 0 | 0 | 0 | 0 | −9.29 | 0.75 | 0.92 |
| Q13546 | RIPK1 | 3\|3\|3 | 9 | 3 | 0\|4\|4 | 0 | 0 | 0 | 0 | 0 | −7.55 | 1.12 | 0.86 |
| P62081 | RPS7 | 22\|25\|29 | 76 | 25.33 | 18\|21\|25 | 0 | 0 | 0 | 0 | 0 | −46.04 | 1.19 | 0.92 |
| P62241 | RPS8 | 14\|15\|12 | 41 | 13.67 | 16\|15\|15 | 0 | 0 | 0 | 0 | 0 | −39.65 | 0.89 | 0.92 |
| P62244 | RPS15A | 11\|12\|11 | 34 | 11.33 | 11\|11\|13 | 0 | 0 | 0 | 0 | 0 | −27.93 | 0.97 | 0.91 |
| P50454 | SERPINH1 | 14\|15\|18 | 47 | 15.67 | 18\|16\|16 | 0 | 0 | 0 | 0 | 0 | −41.33 | 0.94 | 0.92 |
| P62249 | RPS16 | 14\|14\|14 | 42 | 14 | 12\|12\|12 | 0 | 0 | 0 | 0 | 0 | −24.77 | 1.17 | 0.91 |
| P12236 | SLC25A6 | 13\|11\|12 | 36 | 12 | 12\|14\|12 | 0 | 0 | 0 | 0 | 0 | −31.5 | 0.95 | 0.92 |
| P12235 | SLC25A4 | 8\|6\|8 | 22 | 7.33 | 6\|8\|6 | 0 | 0 | 0 | 0 | 0 | −17.57 | 1.1 | 0.9 |
| O95487-2 | SEC24B | 2\|2\|0 | 4 | 1.33 | 3\|0\|2 | 0 | 0 | 0 | 0 | 0 | −9.13 | 0.8 | 0.83 |
| Q9NP64-2 | ZCCHC17 | 2\|3\|4 | 9 | 3 | 6\|8\|7 | 0 | 0 | 0 | 0 | 0 | −26.33 | 0.43 | 0.92 |
| O60506-4 | SYNCRIP | 7\|5\|5 | 17 | 5.67 | 7\|8\|10 | 0 | 0 | 0 | 0 | 0 | −25.39 | 0.68 | 0.92 |
| Q09028-4 | RBBP4 | 5\|5\|5 | 15 | 5 | 5\|6\|4 | 0 | 0 | 0 | 0 | 0 | −13.14 | 1 | 0.92 |
| O94986-3 | CEP152 | 2\|3\|3 | 8 | 2.67 | 2\|2\|4 | 0 | 0 | 0 | 0 | 0 | −9.29 | 1 | 0.86 |
| P34931 | HSPA1L | 21\|15\|16 | 52 | 17.33 | 13\|15\|15 | 0 | 0 | 0 | 0 | 0 | −31.53 | 1.21 | 0.91 |
| P34932 | HSPA4 | 8\|5\|12 | 25 | 8.33 | 5\|5\|8 | 0 | 0 | 0 | 0 | 0 | −16.65 | 1.39 | 0.86 |
| P51149 | RAB7A | 13\|10\|12 | 35 | 11.67 | 13\|11\|14 | 0 | 0 | 0 | 0 | 0 | −33.08 | 0.92 | 0.92 |
| P51148 | RAB5C | 6\|9\|9 | 24 | 8 | 9\|7\|9 | 0 | 0 | 0 | 0 | 0 | −23.63 | 0.96 | 0.91 |
| P05166 | PCCB | 19\|18\|16 | 53 | 17.67 | 24\|22\|20 | 0 | 0 | 0 | 0 | 0 | −57.78 | 0.8 | 0.92 |
| P05165 | PCCA | 49\|149\|15 | 448 | 149.33 | 75\|170\|18 | 0 | 0 | 0 | 0 | 0 | −410.1 | 0.85 | 0.92 |
| P08559-3 | PDHA1 | 10\|11\|12 | 33 | 11 | 11\|11\|11 | 0 | 0 | 0 | 0 | 0 | −27.02 | 1 | 0.91 |
| Q6RFH5 | WDR74 | 6\|7\|10 | 23 | 7.67 | 3\|8\|4 | 0 | 0 | 0 | 0 | 0 | −11.62 | 1.53 | 0.85 |
| P55265 | ADAR | 18\|16\|19 | 53 | 17.67 | 18\|23\|17 | 0 | 0 | 0 | 0 | 0 | −47.89 | 0.91 | 0.92 |
| P10412 | HIST1H1E | 9\|6\|4 | 19 | 6.33 | 8\|6\|3 | 0 | 0 | 0 | 0 | 0 | −17.1 | 1.12 | 0.89 |
| Q9UHD8-7 | 9-Sep | 11\|12\|12 | 35 | 11.67 | 10\|11\|15 | 0 | 0 | 0 | 0 | 0 | −29.1 | 0.97 | 0.92 |
| P30050 | RPL12 | 10\|4\|7 | 21 | 7 | 6\|5\|9 | 0 | 0 | 0 | 0 | 0 | −20.83 | 1.05 | 0.9 |
| P35998 | PSMC2 | 16\|17\|15 | 48 | 16 | 14\|20\|17 | 0 | 0 | 0 | 0 | 0 | −40.97 | 0.94 | 0.92 |
| P55795 | HNRNPH2 | 25\|21\|22 | 68 | 22.67 | 25\|25\|33 | 0 | 0 | 0 | 0 | 0 | −70.5 | 0.82 | 0.92 |
| O905140 | MFN2 | 2\|0\|3 | 5 | 1.67 | 0\|3\|3 | 0 | 0 | 0 | 0 | 0 | −10.34 | 0.83 | 0.84 |
| PS5084-2 | HADHB | 5\|3\|4 | 12 | 4 | 3\|3\|4 | 0 | 0 | 0 | 0 | 0 | −10.17 | 1.2 | 0.86 |
| P08729 | KRT7 | 44\|39\|43 | 126 | 42 | 45\|43\|41 | 0 | 0 | 0 | 0 | 0 | −97.87 | 0.98 | 0.92 |
| Q9NNWS | WDR6 | 0\|3\|0 | 3 | 3 | 3\|2\|2 | 0 | 0 | 0 | 0 | 0 | −11.93 | 0.43 | 0.86 |
| P60893 | PRPS1 | 7\|6\|9 | 22 | 7.33 | 6\|10\|8 | 0 | 0 | 0 | 0 | 0 | −22.37 | 0.92 | 0.91 |
| Q9HAU0-5 | PLEKHAS | 2\|2\|0 | 4 | 1.33 | 2\|4\|3 | 0 | 0 | 0 | 0 | 0 | −14.75 | 0.44 | 0.92 |
| Q13409-3 | DYNC112 | 11\|6\|9 | 26 | 8.67 | 5\|6\|8 | 0 | 0 | 0 | 0 | 0 | −16.39 | 1.37 | 0.88 |
| Q86UK7-2 | ZNF598 | 9\|9\|8 | 26 | 8.67 | 9\|9\|6 | 0 | 0 | 0 | 0 | 0 | −19.36 | 1.08 | 0.91 |
| Q8WWI1-3 | LMO7 | 15\|15\|11 | 41 | 13.67 | 10\|12\|15 | 0 | 0 | 0 | 0 | 0 | −30.3 | 1.11 | 0.91 |
| O15143 | ARPC1B | 9\|6\|9 | 24 | 8 | 11\|9\|11 | 0 | 0 | 0 | 0 | 0 | −31.24 | 0.77 | 0.92 |
| O15144 | ARPC2 | 3\|3\|3 | 9 | 3 | 3\|5\|4 | 0 | 0 | 0 | 0 | 0 | −12.5 | 0.75 | 0.92 |
| O15145 | ARPC3 | 3\|4\|3 | 10 | 3.33 | 4\|5\|3 | 0 | 0 | 0 | 0 | 0 | −12.5 | 0.83 | 0.92 |
| Q96KP4 | CNDP2 | 7\|8\|4 | 19 | 6.33 | 6\|7\|6 | 0 | 0 | 0 | 0 | 0 | −19.55 | 1 | 0.9 |
| Q9Y266 | NUDC | 2\|2\|2 | 6 | 2 | 3\|0\|3 | 0 | 0 | 0 | 0 | 0 | −6.82 | 3 | 0.92 |
| Q9Y265 | RUVBL1 | 4\|5\|5 | 14 | 4.67 | 6\|4\|4 | 0 | 0 | 0 | 0 | 0 | −13.43 | 1 | 0.89 |
| Q9Y263 | PLAA | 11\|12\|12 | 35 | 11.67 | 12\|10\|11 | 0 | 0 | 0 | 0 | 0 | −25.58 | 1.06 | 0.91 |
| Q08211 | DHX9 | 35\|35\|39 | 109 | 36.33 | 43\|43\|44 | 0 | 0 | 0 | 0 | 0 | −105.42 | 0.84 | 0.92 |
| P11310 | ACADM | 3\|2\|2 | 7 | 2.33 | 4\|3\|0 | 0 | 0 | 0 | 0 | 0 | −7.93 | 1 | 0.85 |
| Q5TFE4 | NTSDC1 | 4\|4\|5 | 13 | 4.33 | 6\|7\|9 | 0 | 0 | 0 | 0 | 0 | −23.39 | 0.59 | 0.92 |
| QSTAT6 | NPLOC4 | 7\|4\|7 | 18 | 6 | 4\|9\|7 | 0 | 0 | 0 | 0 | 0 | −20.83 | 0.9 | 0.9 |
| P21333-2 | FLNA | 34\|35\|30 | 99 | 33 | 55\|48\|50 | 0 | 0 | 0 | 0 | 0 | −143.56 | 0.65 | 0.92 |
| P63010-3 | AP281 | 8\|6\|7 | 21 | 7 | 5\|4\|4 | 0 | 0 | 0 | 0 | 0 | −9.36 | 1.62 | 0.85 |
| P46777 | RPLS | 35\|36\|28 | 99 | 33 | 33\|35\|29 | 0 | 0 | 0 | 0 | 0 | −76.32 | 1.02 | 0.92 |
| O43823 | AKAP8 | 6\|6\|7 | 19 | 6.33 | 8\|6\|5 | 0 | 0 | 0 | 0 | 0 | −16.39 | 1 | 0.9 |
| O95816 | BAG2 | 3\|3\|3 | 9 | 3 | 2\|2\|2 | 0 | 0 | 0 | 0 | 0 | −5.46 | 1.5 | 0.81 |
| Q01085-2 | ITIAL1 | 6\|7\|9 | 22 | 7.33 | 7\|7\|6 | 0 | 0 | 0 | 0 | 0 | −17.57 | 1.1 | 0.9 |
| Q99798 | ACO2 | 6\|4\|5 | 15 | 5 | 10\|7\|9 | 0 | 0 | 0 | 0 | 0 | −28.65 | 0.58 | 0.92 |
| Q13148 | TARDBP | 8\|10\|9 | 27 | 9 | 9\|11\|10 | 0 | 0 | 0 | 0 | 0 | −26.49 | 0.9 | 0.92 |
| Q13144 | EIF2BS | 3\|2\|2 | 7 | 2.33 | 2\|2\|3 | 0 | 0 | 0 | 0 | 0 | −8.1 | 1 | 0.86 |
| Q00325-2 | SLC25A3 | 14\|11\|14 | 39 | 13 | 14\|13\|13 | 0 | 0 | 0 | 0 | 0 | −33.92 | 0.97 | 0.92 |
| Q92785 | DPF2 | 2\|0\|0 | 2 | 0.67 | 0\|2\|2 | 0 | 0.01 | 0 | 0.01 | 0 | −7.8 | 0.5 | 0.82 |
| P46087 | NOP2 | 4\|3\|6 | 13 | 4.33 | 6\|4\|3 | 0 | 0 | 0 | 0 | 0 | −13.76 | 1 | 0.88 |
| P54578-2 | USP14 | 6\|7\|6 | 19 | 6.33 | 6\|4\|5 | 0 | 0 | 0 | 0 | 0 | −11.69 | 1.27 | 0.89 |
| Q01469 | FABPS | 3\|2\|5 | 10 | 3.33 | 3\|3\|3 | 0 | 0 | 0 | 0 | 0 | −10.42 | 1.11 | 0.85 |
| P35579 | MYH9 | 19\|14\|17 | 50 | 16.67 | 23\|24\|21 | 0 | 0 | 0 | 0 | 0 | −63.93 | 0.74 | 0.92 |
| O14929-2 | HAT1 | 0\|2\|0 | 2 | 0.67 | 2\|2\|2 | 0 | 0 | 0 | 0 | 0 | −10.44 | 0.33 | 0.92 |
| P62888 | RPL30 | 3\|6\|6 | 15 | 5 | 8\|7\|7 | 0 | 0 | 0 | 0 | 0 | −25.42 | 0.68 | 0.92 |
| Q96P11-2 | NSUN5 | 0\|0\|2 | 2 | 0.67 | 2\|2\|4 | 0 | 0 | 0 | 0 | 0 | −13.39 | 0.25 | 0.92 |
| O43175 | PHGDH | 0\|0\|2 | 2 | 0.67 | 3\|2\|2 | 0 | 0 | 0 | 0 | 0 | −11.93 | 0.29 | 0.92 |
| Q9NYB9-2 | ABI2 | 5\|4\|5 | 14 | 4.67 | 4\|6\|3 | 0 | 0 | 0 | 0 | 0 | −12.24 | 1.08 | 0.89 |
| P26599 | PTBP1 | 9\|7\|11 | 27 | 9 | 9\|11\|14 | 0 | 0 | 0 | 0 | 0 | −33.24 | 0.79 | 0.92 |
| O43396 | TXNL1 | 3\|3\|3 | 9 | 3 | 3\|5\|0 | 0 | 0 | 0 | 0 | 0 | −7.46 | 1.12 | 0.85 |
| O43395 | PRPF3 | 0\|2\|0 | 2 | 0.67 | 6\|4\|4 | 0 | 0 | 0 | 0 | 0 | −22.08 | 0.14 | 0.92 |
| Q13557-12 | CAMK2D | 2\|2\|2 | 6 | 2 | 2\|2\|2 | 0 | 0 | 0 | 0 | 0 | −6.91 | 1 | 0.92 |
| P12956 | XRCC6 | 26\|23\|23 | 72 | 24 | 30\|27\|26 | 0 | 0 | 0 | 0 | 0 | −67.21 | 0.87 | 0.92 |
| P23526 | AHCY | 35\|34\|40 | 109 | 36.33 | 32\|36\|36 | 0 | 0 | 0 | 0 | 0 | −75.63 | 1.05 | 0.92 |
| P23527 | HIST1H2B0 | 4\|5\|5 | 14 | 4.67 | 7\|9\|6 | 0 | 0 | 0 | 0 | 0 | −23.39 | 0.64 | 0.92 |
| P09874 | PARP1 | 36\|34\|39 | 109 | 36.33 | 44\|38\|42 | 0 | 0 | 0 | 0 | 0 | −99.67 | 0.88 | 0.92 |
| P23528 | CFL1 | 9\|10\|9 | 28 | 9.33 | 12\|12\|18 | 0 | 0 | 0 | 0 | 0 | −39.8 | 0.67 | 0.92 |
| Q96PK6-5 | RBM14 | 6\|5\|5 | 16 | 5.33 | 7\|7\|6 | 0 | 0 | 0 | 0 | 0 | −19.11 | 0.8 | 0.92 |
| P19388 | POLR2E | 2\|2\|2 | 6 | 2 | 0\|3\|3 | 0 | 0 | 0 | 0 | 0 | −6.82 | 1 | 0.92 |
| O14828-2 | SCAMP3 | 6\|4\|6 | 16 | 5.33 | 8\|6\|9 | 0 | 0 | 0 | 0 | 0 | −24.7 | 0.7 | 0.92 |
| Q14697 | GANAB | 18\|19\|18 | 55 | 18.33 | 18\|19\|16 | 0 | 0 | 0 | 0 | 0 | −38.92 | 1.04 | 0.92 |
| P19387 | POLR2C | 5\|4\|5 | 14 | 4.67 | 4\|3\|3 | 0 | 0 | 0 | 0 | 0 | −8.71 | 1.4 | 0.86 |
| Q93009-3 | USP7 | 10\|8\|7 | 25 | 8.33 | 8\|9\|10 | 0 | 0 | 0 | 0 | 0 | −24.43 | 0.93 | 0.91 |
| P36507 | MAP2K2 | 3\|3\|3 | 9 | 3 | 3\|3\|2 | 0 | 0 | 0 | 0 | 0 | −7.81 | 1.12 | 0.86 |
| Q15654 | TRIP6 | 8\|10\|9 | 27 | 9 | 9\|10\|10 | 0 | 0 | 0 | 0 | 0 | −25.3 | 0.93 | 0.91 |
| P36873 | PPP1CC | 9\|7\|7 | 23 | 7.67 | 6\|8\|10 | 0 | 0 | 0 | 0 | 0 | −20.8 | 0.96 | 0.91 |
| P36873 | PGM1 | 3\|2\|4 | 9 | 3 | 4\|2\|2 | 0 | 0 | 0 | 0 | 0 | −9.29 | 1.12 | 0.85 |
| Q9UPT8 | ZC3H4 | 4\|4\|5 | 13 | 4.33 | 6\|4\|3 | 0 | 0 | 0 | 0 | 0 | −12.24 | 1 | 0.89 |
| Q3MHD2 | LSM12 | 0\|0\|2 | 2 | 0.67 | 3\|2\|3 | 0 | 0 | 0 | 0 | 0 | −13.39 | 0.25 | 0.92 |
| Q6DD87 | ZNF787 | 4\|2\|2 | 8 | 2.67 | 5\|0\|2 | 0 | 0.01 | 0 | 0.01 | 0 | −7.76 | 1.14 | 0.83 |
| Q6DD88 | ATL3 | 0\|2\|2 | 4 | 1.33 | 3\|0\|3 | 0 | 0 | 0 | 0 | 0 | −10.34 | 0.67 | 0.92 |
| Q9Y508-2 | GTF3C5 | 5\|5\|4 | 14 | 4.67 | 5\|5\|4 | 0 | 0 | 0 | 0 | 0 | −13.43 | 1 | 0.89 |
| Q9BRA2 | TXNDC17 | 2\|2\|4 | 8 | 2.67 | 2\|3\|2 | 0 | 0.01 | 0 | 0.01 | 0 | −8.1 | 1.14 | 0.84 |
| Q96176-9 | MMS19 | 0\|2\|0 | 2 | 0.67 | 0\|2\|2 | 0 | 0.01 | 0 | 0.01 | 0 | −7.8 | 0.5 | 0.82 |
| Q9BQ04 | RBM4B | 0\|2\|3 | 5 | 1.67 | 4\|2\|5 | 0 | 0 | 0 | 0 | 0 | −17.71 | 0.45 | 0.92 |
| Q5T6V5 | C9ORF64 | 0\|0\|2 | 2 | 0.67 | 3\|2\|0 | 0 | 0 | 0 | 0 | 0 | −9.13 | 0.4 | 0.84 |
| Q9UBU8-2 | MORF4L1 | 4\|4\|4 | 12 | 4 | 2\|3\|3 | 0 | 0 | 0 | 0 | 0 | −6.37 | 1.5 | 0.84 |
| P06241 | FYN | 5\|4\|6 | 15 | 5 | 5\|5\|4 | 0 | 0 | 0 | 0 | 0 | −13.43 | 1.07 | 0.89 |
| P22695 | UQCRC2 | 10\|12\|12 | 34 | 11.33 | 11\|10\|11 | 0 | 0 | 0 | 0 | 0 | −25.86 | 1.06 | 0.91 |
| P22694 | PRKACB | 4\|3\|2 | 9 | 3 | 2\|4\|3 | 0 | 0 | 0 | 0 | 0 | −10.42 | 1 | 0.87 |
| Q16555-2 | DPYSL2 | 8\|10\|5 | 23 | 7.67 | 5\|8\|6 | 0 | 0 | 0 | 0 | 0 | −17.88 | 1.21 | 0.89 |
| P11021 | HSPA5 | 13\|17\|14 | 44 | 14.67 | 14\|19\|16 | 0 | 0 | 0 | 0 | 0 | −41.71 | 0.9 | 0.92 |
| Q13620-1 | CUL4B | 4\|4\|2 | 10 | 3.33 | 0\|5\|5 | 0 | 0 | 0 | 0 | 0 | −11.39 | 1 | 0.87 |
| Q96CW1-2 | AP2M1 | 5\|3\|2 | 10 | 3.33 | 4\|2\|4 | 0 | 0 | 0 | 0 | 0 | −11.71 | 1 | 0.87 |
| Q13885 | TUBB2A | 94\|91\|96 | 281 | 93.67 | 100\|93\|91 | 0 | 0 | 0 | 0 | 0 | −204.46 | 0.99 | 0.92 |
| O00148 | DDX39A | 12\|11\|17 | 40 | 13.33 | 12\|12\|12 | 0 | 0 | 0 | 0 | 0 | −29.1 | 1.11 | 0.91 |
| Q9BW19 | KIFC1 | 2\|4\|3 | 9 | 3 | 2\|4\|3 | 0 | 0 | 0 | 0 | 0 | −10.42 | 1 | 0.87 |
| P48643 | CCTS | 25\|27\|27 | 79 | 26.33 | 35\|43\|44 | 0 | 0 | 0 | 0 | 0 | −112.92 | 0.65 | 0.92 |
| Q14807-2 | KIF22 | 2\|3\|0 | 5 | 1.67 | 5\|4\|3 | 0 | 0 | 0 | 0 | 0 | −19.11 | 0.42 | 0.92 |
| 075179-7 | ANKRD17 | 7\|10\|11 | 28 | 9.33 | 6\|11\|10 | 0 | 0 | 0 | 0 | 0 | −24.43 | 1.04 | 0.91 |
| P30041 | PRDX6 | 8\|10\|5 | 23 | 7.67 | 7\|6\|6 | 0 | 0 | 0 | 0 | 0 | −17.88 | 1.21 | 0.89 |
| Q9Y678 | COPG1 | 17\|10\|16 | 43 | 14.33 | 13\|12\|14 | 0 | 0 | 0 | 0 | 0 | −34.3 | 1.1 | 0.91 |
| Q9Y679 | AUP1 | 4\|5\|4 | 13 | 4.33 | 4\|7\|4 | 0 | 0 | 0 | 0 | 0 | −14.57 | 0.87 | 0.92 |
| P50579-3 | METAP2 | 4\|2\|3 | 9 | 3 | 3\|3\|4 | 0 | 0 | 0 | 0 | 0 | −11.71 | 0.9 | 0.88 |
| P55786 | NPEPPS | 3\|3\|4 | 10 | 3.33 | 4\|4\|4 | 0 | 0 | 0 | 0 | 0 | −12.5 | 0.83 | 0.92 |
| P37837 | TALDO1 | 2\|2\|2 | 6 | 2 | 2\|4\|2 | 0 | 0 | 0 | 0 | 0 | −9.29 | 0.75 | 0.92 |
| Q16637-4 | SMN2; | 0\|3\|3 | 6 | 2 | 4\|3\|0 | 0 | 0 | 0 | 0 | 0 | −11.76 | 0.86 | 0.85 |
| | SMN1 | | | | | | | | | | | | |
| Q9NP72 | RAB18 | 3\|4\|3 | 10 | 3.33 | 4\|4\|5 | 0 | 0 | 0 | 0 | 0 | −13.76 | 0.77 | 0.92 |
| P62879 | GNB2 | 3\|4\|4 | 11 | 3.67 | 3\|3\|5 | 0 | 0 | 0 | 0 | 0 | −11.36 | 1 | 0.88 |
| Q9NRR4-2 | DROSHA | 2\|2\|0 | 4 | 1.33 | 3\|2\|3 | 0 | 0 | 0 | 0 | 0 | −13.39 | 0.5 | 0.92 |
| Q15003 | NCAPH | 9\|9\|4 | 22 | 7.33 | 6\|5\|6 | 0 | 0 | 0 | 0 | 0 | −17.06 | 1.29 | 0.88 |
| Q9C0C2 | TNKS1BP1 | 3\|2\|3 | 8 | 2.67 | 6\|4\|4 | 0 | 0 | 0 | 0 | 0 | −16.88 | 0.57 | 0.92 |
| Q15796-2 | SMAD2 | 2\|0\|0 | 2 | 0.67 | 2\|2\|2 | 0 | 0 | 0 | 0 | 0 | −10.44 | 0.33 | 0.92 |
| Q6KB66-2 | KRT80 | 2\|0\|2 | 4 | 1.33 | 3\|2\|0 | 0 | 0 | 0 | 0 | 0 | −9.13 | 0.8 | 0.83 |
| Q9UKG1 | APPL1 | 5\|5\|6 | 16 | 5.33 | 4\|2\|5 | 0 | 0 | 0 | 0 | 0 | −8.45 | 1.45 | 0.86 |
| Q9H2G2-2 | SLK | 0\|2\|2 | 4 | 1.33 | 3\|3\|3 | 0 | 0 | 0 | 0 | 0 | −14.75 | 0.44 | 0.92 |
| Q06210-2 | GFPT1 | 21\|21\|20 | 62 | 20.6 | 18\|18\|19 | 0 | 0 | 0 | 0 | 0 | −38.38 | 1.13 | 0.92 |
| P18085 | ARF4 | 9\|8\|7 | 24 | 8 | 8\|3\|8 | 0 | 0 | 0 | 0 | 0 | −14.9 | 1.26 | 0.9 |
| O75821 | EIF3G | 2\|3\|3 | 8 | 2.67 | 2\|2\|4 | 0 | 0 | 0 | 0 | 0 | −9.29 | 1 | 0.86 |
| P30044-2 | PRDX5 | 6\|3\|5 | 14 | 4.67 | 3\|5\|4 | 0 | 0 | 0 | 0 | 0 | −12.5 | 1.17 | 0.87 |
| P78373-2 | CCT2 | 4\|0\|3 | 7 | 2.33 | 3\|3\|4 | 0 | 0 | 0 | 0 | 0 | −16.24 | 0.7 | 0.88 |
| Q9UG18-2 | TES | 12\|7\|8 | 27 | 9 | 13\|11\|10 | 0 | 0 | 0 | 0 | 0 | −33.24 | 0.79 | 0.91 |
| Q5VV41 | ARHGEF16 | 3\|8\|6 | 17 | 5.67 | 7\|6\|10 | 0 | 0 | 0 | 0 | 0 | −26.78 | 0.74 | 0.91 |
| P04222 | HLA-C | 3\|4\|4 | 11 | 3.67 | 3\|5\|3 | 0 | 0 | 0 | 0 | 0 | −11.36 | 1 | 0.88 |
| P68104 | EEF1A1 | 86\|81\|83 | 250 | 83.33 | 74\|94\|97 | 0 | 0 | 0 | 0 | 0 | −196.66 | 0.94 | 0.92 |
| P27635 | RPL10 | 21\|17\|20 | 58 | 19.33 | 21\|22\|19 | 0 | 0 | 0 | 0 | 0 | −51.18 | 0.94 | 0.92 |
| Q9UHB9-4 | SRP68 | 5\|5\|4 | 14 | 4.67 | 3\|2\|4 | 0 | 0 | 0 | 0 | 0 | −7.54 | 1.56 | 0.84 |
| Q9Y2H6-2 | FNDC3A | 4\|7\|4 | 15 | 5 | 4\|2\|9 | 0 | 0 | 0 | 0 | 0 | −14.2 | 1 | 0.89 |
| Q9Y450 | HBS1L | 6\|4\|7 | 17 | 5.67 | 8\|10\|7 | 0 | 0 | 0 | 0 | 0 | −27.32 | 0.68 | 0.92 |
| Q92804-2 | TAF15 | 25\|11\|17 | 53 | 17.67 | 15\|12\|10 | 0 | 0 | 0 | 0 | 0 | −30.3 | 1.43 | 0.89 |
| Q5BKZ1 | ZNF326 | 3\|6\|3 | 12 | 4 | 5\|2\|5 | 0 | 0 | 0 | 0 | 0 | −12.5 | 1 | 0.87 |
| Q6L807-2 | PDE12 | 5\|7\|7 | 19 | 6.33 | 7\|6\|8 | 0 | 0 | 0 | 0 | 0 | −20.31 | 0.9 | 0.92 |
| Q13151 | HNRNPAO | 8\|9\|8 | 25 | 8.33 | 7\|7\|7 | 0 | 0 | 0 | 0 | 0 | −15.83 | 1.19 | 0.9 |
| Q13155 | AIMP2 | 2\|4\|3 | 9 | 3 | 3\|3\|2 | 0 | 0 | 0 | 0 | 0 | −9.29 | 1.12 | 0.85 |
| Q14192 | FHL2 | 6\|5\|4 | 15 | 5 | 6\|5\|5 | 0 | 0 | 0 | 0 | 0 | −15.82 | 0.94 | 0.9 |
| Q86TC9 | MYPN | 5\|5\|6 | 16 | 5.33 | 3\|4\|3 | 0 | 0 | 0 | 0 | 0 | −7.29 | 1.6 | 0.84 |
| P62891 | RPL39 | 3\|3\|3 | 9 | 3 | 6\|3\|2 | 0 | 0 | 0 | 0 | 0 | −11.37 | 0.82 | 0.92 |
| Q14204 | DYNC1H1 | 26\|26\|20 | 72 | 24 | 32\|26\|26 | 0 | 0 | 0 | 0 | 0 | −73.47 | 0.86 | 0.92 |
| P62899 | RPL31 | 4\|4\|3 | 11 | 3.67 | 3\|5\|3 | 0 | 0 | 0 | 0 | 0 | −11.36 | 1 | 0.88 |
| P00338 | LDHA | 15\|11\|15 | 41 | 13.67 | 15\|15\|14 | 0 | 0 | 0 | 0 | 0 | −38.84 | 0.93 | 0.92 |
| Q92841 | DDX17 | 50\|50\|45 | 145 | 48.33 | 54\|53\|50 | 0 | 0 | 0 | 0 | 0 | −122.36 | 0.92 | 0.92 |
| P68032 | ACTC | 73\|71\|76 | 220 | 73.33 | 82\|78\|72 | 0 | 0 | 0 | 0 | 0 | −172.53 | 0.95 | 0.92 |
| P07814 | EPRS | 32\|33\|37 | 102 | 34 | 40\|30\|35 | 0 | 0 | 0 | 0 | 0 | −79.78 | 0.97 | 0.92 |
| P22102 | GART | 12\|9\|13 | 34 | 11.33 | 8\|9\|12 | 0 | 0 | 0 | 0 | 0 | −23.79 | 1.17 | 0.91 |
| O75643 | SNRNP200 | 11\|7\|7 | 25 | 8.33 | 12\|17\|14 | 0 | 0 | 0 | 0 | 0 | −44.99 | 0.58 | 0.92 |
| Q15185-4 | PTGES3 | 4\|4\|5 | 13 | 4.33 | 4\|4\|5 | 0 | 0 | 0 | 0 | 0 | −12.24 | 3 | 0.89 |
| Q8WWY3 | PRPF31 | 3\|5\|3 | 11 | 3.67 | 5\|4\|5 | 0 | 0 | 0 | 0 | 0 | −15.01 | 0.79 | 0.9 |
| P04049 | RAF1 | 3\|0\|2 | 5 | 1.67 | 2\|0\|4 | 0 | 0.01 | 0 | 0.01 | 0 | −10.2 | 0.83 | 0.83 |
| O60271-4 | ISPAG9 | 3\|3\|5 | 11 | 3.67 | 8\|6\|10 | 0 | 0 | 0 | 0 | 0 | −28.1 | 0.46 | 0.92 |
| Q9ULX6-2 | AKAPSL | 2\|2\|4 | 8 | 2.67 | 0\|4\|4 | 0 | 0 | 0 | 0 | 0 | −9.13 | 1 | 0.85 |
| Q12931-2 | TRAP1 | 22\|24\|23 | 69 | 23 | 26\|24\|29 | 0 | 0 | 0 | 0 | 0 | −63.93 | 0.87 | 0.92 |
| Q14739 | LBR | 6\|5\|8 | 19 | 6.33 | 9\|8\|7 | 0 | 0 | 0 | 0 | 0 | −24.09 | 0.79 | 0.92 |
| O75534-2 | CSDE1 | 12\|11\|13 | 36 | 12 | 12\|11\|9 | 0 | 0 | 0 | 0 | 0 | −24.4 | 1.12 | 0.91 |
| Q6UUV7-3 | CRTC3 | 2\|2\|0 | 4 | 1.33 | 6\|0\|0 | 0 | 0 | 0 | 0 | 0 | −9.65 | 0.67 | 0.92 |
| Q9UNQ2 | DIMT1 | 3\|5\|3 | 11 | 3.67 | 3\|2\|3 | 0 | 0.01 | 0 | 0.01 | 0 | −7.81 | 1.38 | 0.83 |
| O43491 | EPB41L2 | 7\|4\|3 | 14 | 4.67 | 6\|3\|7 | 0 | 0 | 0 | 0 | 0 | −17.53 | 0.88 | 0.89 |
| P11586 | MTHFD1 | 6\|7\|5 | 18 | 6 | 6\|6\|5 | 0 | 0 | 0 | 0 | 0 | −15.5 | 1.06 | 0.9 |
| P61353 | RPL27 | 12\|13\|13 | 38 | 12.67 | 14\|14\|12 | 0 | 0 | 0 | 0 | 0 | −32.37 | 0.95 | 0.92 |
| O14828 | SCAMP3 | 6\|5\|4 | 15 | 5 | 10\|8\|7 | 0 | 0 | 0 | 0 | 0 | −27.32 | 0.6 | 0.92 |
| P38919 | EIF4A3 | 19\|19\|21 | 59 | 19.67 | 18\|24\|24 | 0 | 0 | 0 | 0 | 0 | −52.87 | 0.89 | 0.92 |
| Q15645 | TRIP13 | 6\|4\|6 | 16 | 5.33 | 8\|6\|6 | 0 | 0 | 0 | 0 | 0 | −20.83 | 0.8 | 0.92 |
| Q13423 | NNT | 8\|11\|8 | 27 | 9 | 11\|9\|12 | 0 | 0 | 0 | 0 | 0 | −28.97 | 0.84 | 0.91 |
| Q7Z794 | KRT77 | 5\|5\|5 | 15 | 5 | 5\|7\|5 | 0 | 0 | 0 | 0 | 0 | −15.5 | 0.88 | 0.92 |
| P35080-2 | PFN2 | 4\|4\|4 | 12 | 4 | 4\|5\|4 | 0 | 0 | 0 | 0 | 0 | −12.24 | 0.92 | 0.92 |
| O8NI27 | THOC2 | 3\|3\|2 | 8 | 2.67 | 5\|3\|4 | 0 | 0 | 0 | 0 | 0 | −14.21 | 0.67 | 0.92 |
| Q13547 | HDAC1 | 4\|7\|9 | 20 | 6.67 | 6\|4\|3 | 0 | 0.01 | 0 | 0.01 | 0 | −12.24 | 1.54 | 0.83 |
| P48735 | IDH2 | 2\|2\|0 | 4 | 1.33 | 4\|2\|3 | 0 | 0 | 0 | 0 | 0 | −14.75 | 0.44 | 0.92 |
| O43660-2 | PLRG1 | 0\|3\|0 | 3 | 1 | 0\|2\|4 | 0 | 0.01 | 0 | 0.01 | 0 | −10.2 | 0.5 | 0.83 |
| P09884 | POLA1 | 2\|0\|0 | 2 | 0.67 | 3\|3\|0 | 0 | 0 | 0 | 0 | 0 | −10.34 | 0.33 | 0.92 |
| 015371-2 | EIF3D | 30\|27\|27 | 84 | 28 | 29\|24\|23 | 0 | 0 | 0 | 0 | 0 | −52.9 | 1.11 | 0.92 |
| Q13085-4 | ACACA | 45\|663\|67 | 1986 | 662 | 57\|672\|67 | 0 | 0 | 0 | 0 | 0 | #NAME? | 0.99 | 0.92 |
| P10768 | ESD | 10\|8\|9 | 27 | 9 | 8\|9\|9 | 0 | 0 | 0 | 0 | 0 | −21.7 | 1.04 | 0.91 |
| P84098 | RPL19 | 9\|10\|10 | 29 | 9.67 | 12\|6\|8 | 0 | 0 | 0 | 0 | 0 | −20.32 | 1.12 | 0.91 |
| Q9Y697-2 | NFS1 | 4\|3\|2 | 9 | 3 | 4\|2\|4 | 0 | 0 | 0 | 0 | 0 | −11.71 | 0.9 | 0.88 |
| P84090 | ERH | 3\|3\|3 | 9 | 3 | 4\|2\|2 | 0 | 0 | 0 | 0 | 0 | −7.81 | 1.12 | 0.86 |
| Q15269 | PWP2 | 514\|2 | 11 | 3.67 | 0\|4\|4 | 0 | 0.01 | 0 | 0.01 | 0 | −9.13 | 1.38 | 0.82 |
| P84095 | RHOG | 3\|3\|2 | 8 | 2.67 | 4\|3\|3 | 0 | 0 | 0 | 0 | 0 | −11.71 | 0.8 | 0.92 |
| P61221 | ABCE1 | 6\|6\|5 | 17 | 5.67 | 6\|5\|5 | 0 | 0 | 0 | 0 | 0 | −14.32 | 1.06 | 0.9 |
| Q13637 | RAB32 | 3\|0\|2 | 5 | 1.67 | 3\|3\|0 | 0 | 0 | 0 | 0 | 0 | −10.34 | 0.83 | 0.84 |
| P62136 | PPP1CA | 11\|10\|10 | 31 | 10.33 | 9\|9\|11 | 0 | 0 | 0 | 0 | 0 | −22.33 | 1.07 | 0.91 |
| O00487 | PSMD14 | 7\|5\|7 | 19 | 6.33 | 2\|4\|5 | 0 | 0 | 0 | 0 | 0 | −8.45 | 1.73 | 0.83 |
| P05141 | SLC25AS | 13\|11\|12 | 36 | 12 | 13\|15\|11 | 0 | 0 | 0 | 0 | 0 | −32.69 | 0.92 | 0.92 |
| O90080 | PA2G4 | 34\|37\|33 | 104 | 34.67 | 37\|36\|31 | 0 | 0 | 0 | 0 | 0 | −77.09 | 1 | 0.92 |
| P37802 | TAGLN2 | 15\|14\|13 | 42 | 14 | 19\|18\|20 | 0 | 0 | 0 | 0 | 0 | −51.69 | 0.74 | 0.92 |
| P04818-2 | TYMS | 4\|4\|3 | 11 | 3.67 | 4\|4\|3 | 0 | 0 | 0 | 0 | 0 | −11.36 | 1 | 0.88 |
| P47712 | PLA2G4A | 7\|8\|4 | 19 | 6.33 | 6\|4\|4 | 0 | 0 | 0 | 0 | 0 | −13.43 | 1.36 | 0.87 |
| Q96101 | THOC3 | 2\|3\|3 | 8 | 2.67 | 4\|3\|3 | 0 | 0 | 0 | 0 | 0 | −11.71 | 0.8 | 0.92 |
| Q9BV38 | WDR18 | 6\|4\|3 | 13 | 4.33 | 4\|6\|5 | 0 | 0 | 0 | 0 | 0 | −16.23 | 0.87 | 0.89 |
| Q96EE3 | SEH1L | 9\|8\|5 | 22 | 7.33 | 5\|7\|6 | 0 | 0 | 0 | 0 | 0 | −16.65 | 1.22 | 0.89 |
| Q9UBE0 | SAE1 | 7\|9\|7 | 23 | 7.67 | 9\|8\|9 | 0 | 0 | 0 | 0 | 0 | −23.23 | 0.88 | 0.91 |
| Q92900-2 | UPF1 | 23\|22\|19 | 64 | 21.33 | 17\|19\|19 | 0 | 0 | 0 | 0 | 0 | −39.82 | 1.16 | 0.92 |
| P13674 | P4HA1 | 3\|2\|3 | 8 | 2.67 | 2\|3\|3 | 0 | 0 | 0 | 0 | 0 | −9.29 | 3 | 0.86 |
| Q96953 | ZNF622 | 6\|5\|5 | 16 | 5.33 | 5\|6\|4 | 0 | 0 | 0 | 0 | 0 | −13.14 | 1.07 | 0.89 |
| Q16891-2 | IMMT | 5\|7\|4 | 16 | 5.33 | 4\|6\|0 | 0 | 0.01 | 0 | 0.0 | 0 | −8.27 | 1.6 | 0.82 |
| 000571 | DDX3X | 55\|59\|54 | 168 | 56 | 51\|53\|68 | 0 | 0 | 0 | 0 | 0 | −126.46 | 0.98 | 0.92 |
| P14866 | HNRNPL | 39\|34\|37 | 110 | 36.67 | 43\|43\|45 | 0 | 0 | 0 | 0 | 0 | −108.31 | 0.84 | 0.92 |
| P52594-2 | AGFG1 | 8\|5\|5 | 18 | 6 | 5\|6\|5 | 0 | 0 | 0 | 0 | 0 | −14.32 | 1.12 | 0.89 |
| P14868 | DARS | 11\|13\|13 | 37 | 12.33 | 13\|14\|10 | 0 | 0 | 0 | 0 | 0 | −30.3 | 1 | 0.91 |
| O95239 | KIF4A | 0\|2\|0 | 2 | 0.67 | 3\|2\|2 | 0 | 0 | 0 | 0 | 0 | −11.93 | 0.29 | 0.92 |
| Q96JM3 | CHAMP1 | 4\|4\|2 | 10 | 3.33 | 6\|6\|5 | 0 | 0 | 0 | 0 | 0 | −20.89 | 0.59 | 0.92 |
| O15027-5 | SEC16A | 18\|18\|23 | 59 | 19.67 | 21\|20\|21 | 0 | 0 | 0 | 0 | 0 | −49.6 | 0.95 | 0.92 |
| Q5T200-2 | ZC3H13 | 2\|0\|0 | 2 | 0.67 | 7\|5\|5 | 0 | 0 | 0 | 0 | 0 | −26.48 | 0.12 | 0.92 |
| P31947-2 | SFN | 2\|0\|2 | 4 | 1.33 | 2\|4\|2 | 0 | 0 | 0 | 0 | 0 | −13.39 | 0.5 | 0.92 |
| Q08123 | NSUN2 | 14\|13\|12 | 39 | 13 | 16\|12\|14 | 0 | 0 | 0 | 0 | 0 | −34.76 | 0.93 | 0.92 |
| P0DPH8 | PODPH8 | 73\|64\|68 | 205 | 68.33 | 69\|63\|66 | 0 | 0 | 0 | 0 | 0 | −142.55 | 1.04 | 0.92 |
| Q13470-2 | TNK1 | 6\|4\|4 | 14 | 4.67 | 9\|8\|5 | 0 | 0 | 0 | 0 | 0 | −23.39 | 0.64 | 0.92 |
| Q9Y446 | PKP3 | 7\|4\|5 | 16 | 5.33 | 5\|5\|5 | 0 | 0 | 0 | 0 | 0 | −14.57 | 1.07 | 0.89 |
| P35221 | CINNA1 | 0\|0\|2 | 2 | 0.67 | 5\|3\|0 | 0 | 0 | 0 | 0 | 0 | −13.16 | 0.25 | 0.92 |
| O60678-2 | PRMT3 | 8\|4\|4 | 16 | 5.33 | 4\|2\|5 | 0 | 0.01 | 0 | 0.01 | 0 | −9.88 | 1.45 | 0.81 |
| Q969V3-2 | NCLN | 55\|5 | 15 | 5 | 4\|5\|2 | 0 | 0 | 0 | 0 | 0 | −8.45 | 1.36 | 0.87 |
| O9Y3A5 | SBDS | 13\|15\|12 | 40 | 13.33 | 14\|13\|12 | 0 | 0 | 0 | 0 | 0 | −31.17 | 1.03 | 0.91 |
| Q9H4A3-2 | WNK1 | 5\|8\|10 | 23 | 7.67 | 7\|8\|8 | 0 | 0 | 0 | 0 | 0 | −22.85 | 3 | 0.9 |
| P42677 | RPS27 | 9\|8\|11 | 28 | 9.33 | 11\|7\|6 | 0 | 0 | 0 | 0 | 0 | −19.36 | 1.17 | 0.9 |
| P98170 | XIAP | 14\|18\|15 | 47 | 15.67 | 19\|18\|15 | 0 | 0 | 0 | 0 | 0 | −43.77 | 0.9 | 0.92 |
| Q99569-2 | PKP4 | 3\|2\|2 | 7 | 2.33 | 0\|3\|4 | 0 | 0 | 0 | 0 | 0 | −7.93 | 1 | 0.85 |
| Q04760 | GLO1 | 10\|12\|8 | 30 | 10 | 12\|11\|9 | 0 | 0 | 0 | 0 | 0 | −28.97 | 0.94 | 0.91 |
| Q5VT66-3 | 1-Mar | 5\|4\|3 | 12 | 4 | 4\|5\|3 | 0 | 0 | 0 | 0 | 0 | −12.5 | 1 | 0.88 |
| Q01082 | SPTBN1 | 6\|5\|3 | 14 | 4.67 | 7\|8\|7 | 0 | 0 | 0 | 0 | 0 | −25.42 | 0.64 | 0.92 |
| Q01081 | U2AF1 | 6\|10\|7 | 23 | 7.67 | 9\|6\|8 | 0 | 0 | 0 | 0 | 0 | −21.17 | 1 | 0.9 |
| P26373 | RPL13 | 26\|23\|27 | 76 | 25.33 | 28\|22\|23 | 0 | 0 | 0 | 0 | 0 | −55.17 | 1.04 | 0.92 |
| P42704 | LRPPRC | 4\|4\|6 | 14 | 4.67 | 4\|7\|4 | 0 | 0 | 0 | 0 | 0 | −14.57 | 0.93 | 0.89 |
| O43719 | HTATSF1 | 6\|4\|3 | 13 | 4.33 | 3\|3\|5 | 0 | 0 | 0 | 0 | 0 | −11.36 | 1.18 | 0.86 |
| 35637-2 | FUS | 5\|7\|6 | 18 | 6 | 6\|11\|11 | 0 | 0 | 0 | 0 | 0 | −29.27 | 0.64 | 0.92 |
| P59998 | ARPC4 | 3\|0\|2 | 5 | 1.67 | 2\|3\|2 | 0 | 0 | 0 | 0 | 0 | −11.93 | 0.71 | 0.86 |
| Q14687-2 | GSE1 | 7\|9\|5 | 21 | 7 | 6\|5\|7 | 0 | 0 | 0 | 0 | 0 | −16.65 | 1.17 | 0.89 |
| PS2272-2 | HNRNPM | 5\|5\|5 | 15 | 5 | 8\|8\|12 | 0 | 0 | 0 | 0 | 0 | −29.27 | 0.54 | 0.92 |
| Q9UHI6 | DDX20 | 3\|3\|2 | 8 | 2.67 | 3\|2\|3 | 0 | 0 | 0 | 0 | 0 | −9.29 | 1 | 0.86 |
| Q9H984 | SFXN1 | 6\|0\|6 | 12 | 4 | 8\|7\|7 | 0 | 0 | 0 | 0 | 0 | −33.84 | 0.55 | 0.92 |
| Q8NDV7-2 | TNRC6A | 7\|9\|14 | 30 | 10 | 8\|6\|12 | 0 | 0 | 0 | 0 | 0 | −23.29 | 1.15 | 0.9 |
| P09543-2 | CNP | 4\|4\|5 | 13 | 4.33 | 5\|4\|6 | 0 | 0 | 0 | 0 | 0 | −14.57 | 0.87 | 0.92 |
| P82675 | MRPSS | 6\|2\|3 | 11 | 3.67 | 4\|3\|4 | 0 | 0 | 0 | 0 | 0 | −12.99 | 1 | 0.86 |
| Q81X81-2 | DNAIC10 | 0\|0\|3 | 3 | 1 | 3\|4\|3 | 0 | 0 | 0 | 0 | 0 | −16.24 | 0.3 | 0.92 |
| P21291 | CSRP1 | 7\|11\|7 | 25 | 8.33 | 8\|8\|8 | 0 | 0 | 0 | 0 | 0 | −20.8 | 1.04 | 0.9 |
| P26358-2 | DNMT1 | 14\|16\|16 | 46 | 15.33 | 18\|16\|16 | 0 | 0 | 0 | 0 | 0 | −41.33 | 0.92 | 0.92 |
| Q9NYJ8 | TAB2 | 3\|2\|3 | 8 | 2.67 | 3\|0\|3 | 0 | 0 | 0 | 0 | 0 | −6.82 | 1.33 | 0.82 |
| Q8IWA0 | WDR75 | 4\|3\|5 | 12 | 4 | 4\|7\|9 | 0 | 0 | 0 | 0 | 0 | −22.76 | 0.6 | 0.92 |
| O95456-2 | PSMG1 | 6\|6\|6 | 18 | 6 | 6\|6\|8 | 0 | 0 | 0 | 0 | 0 | −17.57 | 0.9 | 0.92 |
| P46779-4 | IRPL28 | 12\|17\|15 | 44 | 14.67 | 11\|10\|12 | 0 | 0 | 0 | 0 | 0 | −24.13 | 1.33 | 0.91 |
| Q04695 | KRT17 | 38\|33\|42 | 113 | 37.67 | 41\|38\|46 | 0 | 0 | 0 | 0 | 0 | −102.54 | 0.9 | 0.92 |
| Q8N136 | WDR36 | 7\|10\|8 | 25 | 8.33 | 7\|5\|12 | 0 | 0 | 0 | 0 | 0 | −20.66 | 1.04 | 0.91 |
| Q71RC2-3 | LARP4 | 12\|13\|15 | 40 | 13.33 | 17\|13\|8 | 0 | 0 | 0 | 0 | 0 | −29.89 | 1.05 | 0.91 |
| Q96HC4-6 | \|PDLIM5 | 4\|4\|5 | 13 | 4.33 | 4\|5\|4 | 0 | 0 | 0 | 0 | 0 | −12.24 | 1 | 0.89 |
| P48729 | CSNK1A1 | 3\|2\|4 | 9 | 3 | 4\|0\|3 | 0 | 0.01 | 0 | 0.01 | 0 | −7.93 | 1.29 | 0.83 |
| Q96A08 | HIST1H2BA | 0\|2\|2 | 4 | 1.33 | 3\|2\|0 | 0 | 0 | 0 | 0 | 0 | −9.13 | 0.8 | 0.83 |
| Q8NE71-2 | \|ABCF1 | 10\|11\|12 | 33 | 11 | 13\|10\|11 | 0 | 0 | 0 | 0 | 0 | −28.23 | 0.97 | 0.91 |
| P31930 | UQCRC1 | 8\|11\|13 | 32 | 10.67 | 14\|15\|12 | 0 | 0 | 0 | 0 | 0 | −40.39 | 0.78 | 0.92 |
| P04844 | RPN2 | 13\|9\|10 | 32 | 10.67 | 11\|8\|14 | 0 | 0 | 0 | 0 | 0 | −28.56 | 0.97 | 0.91 |
| P04843 | RPN1 | 17\|17\|10 | 44 | 14.67 | 14\|15\|15 | 0 | 0 | 0 | 0 | 0 | −40.56 | 1 | 0.92 |
| Q9BYG3 | NIFK | 2\|2\|3 | 7 | 2.33 | 3\|0\|3 | 0 | 0 | 0 | 0 | 0 | −6.82 | 1.17 | 0.84 |
| P33981-2 | TTK | 3\|3\|3 | 9 | 3 | 2\|0\|5 | 0 | 0 | 0 | 0 | 0 | −6.2 | 1.29 | 0.83 |
| Q15366-6 | PCBP2 | 25\|27\|25 | 77 | 25.67 | 22\|25\|27 | 0 | 0 | 0 | 0 | 0 | −53.44 | 1.04 | 0.92 |
| Q9P2E9 | RRBP1 | 8\|9\|11 | 28 | 9.33 | 10\|9\|10 | 0 | 0 | 0 | 0 | 0 | −25.3 | 0.97 | 0.91 |
| P61254 | RPL26 | 11\|13\|12 | 36 | 12 | 16\|11\|13 | 0 | 0 | 0 | 0 | 0 | −33.92 | 0.9 | 0.92 |
| P68431 | HIST1H3G; | 2\|2\|2 | 6 | 2 | 3\|2\|2 | 0 | 0 | 0 | 0 | 0 | −8.1 | 0.86 | 0.92 |
| | HIST1H3 | | | | | | | | | | | | |
| Q15459 | SF3A1 | 42\|40\|39 | 121 | 40.33 | 44\|37\|47 | 0 | 0 | 0 | 0 | 0 | −96.68 | 0.95 | 0.92 |
| Q9H0J9 | PARP12 | 2\|0\|0 | 2 | 0.67 | 3\|2\|0 | 0 | 0 | 0 | 0 | 0 | −9.13 | 0.4 | 0.84 |
| Q96EY1-2 | DNAJA3 | 4\|5\|5 | 14 | 4.67 | 5\|7\|5 | 0 | 0 | 0 | 0 | 0 | −17.06 | 0.82 | 0.92 |
| P55072 | VCP | 9\|8\|9 | 26 | 8.67 | 8\|4\|4 | 0 | 0 | 0 | 0 | 0 | −10.02 | 1.62 | 0.87 |
| P51571 | SSR4 | 3\|2\|3 | 8 | 2.67 | 3\|4\|3 | 0 | 0 | 0 | 0 | 0 | −11.71 | 0.8 | 0.92 |
| PS1572 | BCAP31 | 8\|9\|5 | 22 | 7.33 | 5\|7\|7 | 0 | 0 | 0 | 0 | 0 | −17.88 | 1.16 | 0.9 |
| P17706-2 | PTPN2 | 2\|3\|3 | 8 | 2.67 | 3\|0\|3 | 0 | 0 | 0 | 0 | 0 | −6.82 | 1.33 | 0.82 |
| P06737-2 | PYGL | 3\|4\|5 | 12 | 4 | 6\|7\|5 | 0 | 0 | 0 | 0 | 0 | −20.1 | 0.67 | 0.92 |
| P13861-2 | PRKAR2A | 0\|5\|4 | 9 | 3 | 3\|6\|7 | 0 | 0 | 0 | 0 | 0 | −25 | 0.56 | 0.92 |
| Q9BYD1 | MRPL13 | 2\|3\|3 | 8 | 2.67 | 2\|3\|3 | 0 | 0 | 0 | 0 | 0 | −9.29 | 1 | 0.86 |
| P13645 | KRT10 | 40\|28\|32 | 100 | 33.33 | 38\|58\|36 | 0 | 0 | 0 | 0 | 0 | −119.67 | 0.76 | 0.92 |
| P13647 | KRTS | 19\|13\|15 | 47 | 15.67 | 18\|17\|11 | 0 | 0 | 0 | 0 | 0 | −38.05 | 1.02 | 0.92 |
| Q9BTE3-2 | MCMBP | 4\|5\|4 | 13 | 4.33 | 6\|6\|4 | 0 | 0 | 0 | 0 | 0 | −15.82 | 0.81 | 0.92 |
| Q07020 | RPL18 | 12\|14\|11 | 37 | 12.33 | 14\|14\|14 | 0 | 0 | 0 | 0 | 0 | −36.35 | 0.88 | 0.92 |
| Q9NSE4 | LARS2 | 18\|13\|13 | 44 | 14.67 | 14\|18\|15 | 0 | 0 | 0 | 0 | 0 | −39.27 | 0.94 | 0.92 |
| Q9NYF8-3 | BCLAF1 | 0\|2\|0 | 2 | 0.67 | 4\|2\|4 | 0 | 0 | 0 | 0 | 0 | −16.24 | 0.2 | 0.92 |
| Q03252 | LMNB2 | 5\|4\|3 | 12 | 4 | 3\|5\|3 | 0 | 0 | 0 | 0 | 0 | −11.36 | 1.09 | 0.88 |
| P17612 | PRKACA | 5\|7\|5 | 17 | 5.67 | 6\|4\|4 | 0 | 0 | 0 | 0 | 0 | −11.96 | 1.21 | 0.88 |
| Q5SW79 | CEP170 | 7\|4\|5 | 16 | 5.33 | 7\|6\|10 | 0 | 0 | 0 | 0 | 0 | −24.7 | 0.7 | 0.92 |
| Q04917 | YWHAH | 6\|4\|3 | 13 | 4.33 | 4\|5\|9 | 0 | 0 | 0 | 0 | 0 | −20.13 | 0.72 | 0.92 |
| Q9Y230 | RUVBL2 | 13\|13\|13 | 39 | 13 | 17\|15\|18 | 0 | 0 | 0 | 0 | 0 | −42.94 | 0.78 | 0.92 |
| Q92974-3 | ARHGEF2 | 9\|11\|12 | 32 | 10.67 | 8\|11\|8 | 0 | 0 | 0 | 0 | 0 | −21.43 | 1.19 | 0.91 |
| P10515 | DLAT | 13\|14\|9 | 36 | 12 | 13\|13\|13 | 0 | 0 | 0 | 0 | 0 | −35.99 | 0.92 | 0.92 |
| Q9Y606-2 | PUS1 | 2\|3\|2 | 7 | 2.33 | 0\|5\|3 | 0 | 0 | 0 | 0 | 0 | −9.07 | 0.88 | 0.87 |
| P08237 | PFKM | 14\|20\|19 | 53 | 17.67 | 18\|18\|17 | 0 | 0 | 0 | 0 | 0 | −45 | 1 | 0.92 |
| P18754 | RCC3 | 11\|8\|9 | 28 | 9.33 | 8\|8\|8 | 0 | 0 | 0 | 0 | 0 | −19.36 | 1.17 | 0.9 |
| P08238 | HSP90AB1 | 97\|90\|111 | 298 | 99.33 | 11\|111\|10 | 0 | 0 | 0 | 0 | 0 | −262.84 | 0.9 | 0.92 |
| Q7L014 | DDX46 | 3\|5\|4 | 12 | 4 | 16\|14\|8 | 0 | 0 | 0 | 0 | 0 | −47.47 | 0.32 | 0.92 |
| Q1KMD3 | HNRNPUL2 | 0\|4\|4 | 8 | 2.67 | 5\|5\|3 | 0 | 0 | 0 | 0 | 0 | −20.61 | 0.62 | 0.92 |
| P58876 | HIST1H2BD | 4\|5\|6 | 15 | 5 | 9\|8\|5 | 0 | 0 | 0 | 0 | 0 | −23.39 | 0.68 | 0.92 |
| O15226 | NKRF | 0\|3\|2 | 5 | 1.67 | 5\|3\|0 | 0 | 0 | 0 | 0 | 0 | −13.16 | 0.63 | 0.87 |
| Q9P215 | LARS | 17\|14\|15 | 46 | 15.33 | 17\|11\|19 | 0 | 0 | 0 | 0 | 0 | −37.77 | 0.98 | 0.92 |
| P28340 | POLD1 | 5\|3\|4 | 12 | 4 | 3\|4\|3 | 0 | 0 | 0 | 0 | 0 | −10.17 | 1.2 | 0.86 |
| P35237 | SERPINB6 | 6\|6\|9 | 21 | 7 | 8\|4\|7 | 0 | 0 | 0 | 0 | 0 | −16.39 | 1.11 | 0.9 |
| P35232 | PHB | 3\|2\|2 | 7 | 2.33 | 5\|3\|2 | 0 | 0 | 0 | 0 | 0 | −11.71 | 0.7 | 0.92 |
| P30876 | POLR2B | 6\|6\|5 | 17 | 5.67 | 4\|6\|6 | 0 | 0 | 0 | 0 | 0 | −14.32 | 1.06 | 0.9 |
| P15924 | DSP | 28\|24\|29 | 81 | 27 | 28\|30\|26 | 0 | 0 | 0 | 0 | 0 | −66.84 | 0.96 | 0.92 |
| P52948-6 | NUP98 | 17\|20\|18 | 55 | 18.33 | 19\|22\|25 | 0 | 0 | 0 | 0 | 0 | −56.09 | 0.83 | 0.92 |
| Q81X12-2 | CCAR1 | 0\|2\|3 | 5 | 1.67 | 3\|0\|4 | 0 | 0 | 0 | 0 | 0 | −11.76 | 0.71 | 0.85 |
| O95071-2 | UBRS | 7\|4\|4 | 15 | 5 | 12\|8\|7 | 0 | 0 | 0 | 0 | 0 | −29.96 | 0.56 | 0.92 |
| Q9Y3F4 | STRAP | 7\|7\|6 | 20 | 6.67 | 6\|7\|6 | 0 | 0 | 0 | 0 | 0 | −16.39 | 1.05 | 0.9 |
| P17980 | PSMC3 | 8\|11\|8 | 27 | 9 | 8\|9\|6 | 0 | 0 | 0 | 0 | 0 | −18.18 | 1.17 | 0.9 |
| P17987 | TCP1 | 42\|41\|44 | 127 | 42.33 | 44\|41\|48 | 0 | 0 | 0 | 0 | 0 | −99.62 | 0.95 | 0.92 |
| P06239 | LCK | 3\|0\|4 | 7 | 2.33 | 3\|3\|2 | 0 | 0 | 0 | 0 | 0 | −13.39 | 0.88 | 0.85 |
| P63220 | RPS21 | 4\|5\|3 | 12 | 4 | 3\|4\|4 | 0 | 0 | 0 | 0 | 0 | −11.36 | 1.09 | 0.88 |
| O43143 | DHX15 | 19\|17\|14 | 50 | 16.67 | 14\|21\|19 | 0 | 0 | 0 | 0 | 0 | −46.22 | 0.93 | 0.92 |
| P67775 | PPP2CA | 3\|5\|5 | 13 | 4.33 | 5\|7\|6 | 0 | 0 | 0 | 0 | 0 | −20.1 | 0.72 | 0.92 |
| O75663 | TIPRL | 2\|3\|0 | 5 | 1.67 | 3\|0\|4 | 0 | 0 | 0 | 0 | 0 | −11.76 | 0.71 | 0.85 |
| P53597 | SUCLG1 | 2\|2\|4 | 8 | 2.67 | 2\|2\|3 | 0 | 0.01 | 0 | 0.01 | 0 | −8.1 | 1.14 | 0.84 |
| Q6PI48 | DARS2 | 6\|5\|7 | 18 | 6 | 7\|9\|7 | 0 | 0 | 0 | 0 | 0 | −22.85 | 0.78 | 0.92 |
| O43709 | BUD23 | 7\|6\|6 | 19 | 6.33 | 4\|5\|4 | 0 | 0 | 0 | 0 | 0 | −9.36 | 1.46 | 0.87 |
| P84103-2 | ISRSF3 | 2\|0\|3 | 5 | 1.67 | 2\|0\|5 | 0 | 0 | 0 | 0 | 0 | −11.59 | 0.71 | 0.85 |
| P42285 | SKIV2L2 | 5\|8\|8 | 21 | 7 | 8\|6\|5 | 0 | 0 | 0 | 0 | 0 | −17.88 | 1.11 | 0.9 |
| P62424 | RPLZA | 22\|21\|23 | 66 | 22 | 30\|24\|22 | 0 | 0 | 0 | 0 | 0 | −61.87 | 0.87 | 0.92 |
| P28331-3 | NDUFS1 | 5\|4\|5 | 14 | 4.67 | 4\|3\|3 | 0 | 0 | 0 | 0 | 0 | −8.71 | 1.4 | 0.86 |
| P07900 | HSP90AA1 | 43\|44\|48 | 135 | 45 | 56\|55\|55 | 0 | 0 | 0 | 0 | 0 | −136.68 | 0.81 | 0.92 |
| Q14152 | EIF3A | 2\|3\|7 | 1.2 | 4 | 12\|7\|4 | 0 | 0 | 0 | 0 | 0 | −28.89 | 0.52 | 0.92 |
| Q14151 | SAFB2 | 4\|5\|4 | 13 | 4.33 | 13\|10\|13 | 0 | 0 | 0 | 0 | 0 | −42.17 | 0.36 | 0.92 |
| P26038 | MSN | 2\|2\|0 | 4 | 1.33 | 2\|3\|2 | 0 | 0 | 0 | 0 | 0 | −11.93 | 0.57 | 0.92 |
| Q9Y5J1 | UTP18 | 2\|0\|2 | 4 | 1.33 | 3\|3\|3 | 0 | 0 | 0 | 0 | 0 | −14.75 | 0.44 | 0.92 |
| P19623 | SRM | 5\|8\|5 | 18 | 6 | 4\|3\|5 | 0 | 0 | 0 | 0 | 0 | −9.61 | 1.5 | 0.84 |
| P15121 | AKR181 | 4\|5\|4 | 13 | 4.33 | 4\|3\|3 | 0 | 0 | 0 | 0 | 0 | −8.71 | 1.3 | 0.86 |
| P34897-3 | SHMT2 | 5\|6\|7 | 18 | 6 | 5\|7\|7 | 0 | 0 | 0 | 0 | 0 | −17.88 | 0.95 | 0.9 |
| P63241 | EIFSA | 9\|4\|8 | 21 | 7 | 8\|6\|6 | 0 | 0 | 0 | 0 | 0 | −20.83 | 1.05 | 0.9 |
| P63244 | RACK1 | 15\|13\|15 | 43 | 14.33 | 11\|14\|15 | 0 | 0 | 0 | 0 | 0 | −30.9 | 1.07 | 0.92 |
| Q13443 | ADAM9 | 4\|6\|6 | 16 | 5.33 | 5\|2\|3 | 0 | 0 | 0 | 0 | 0 | −8.71 | 1.6 | 0.83 |
| P62333 | PSMC6 | 8\|6\|5 | 19 | 6.33 | 10\|5\|9 | 0 | 0 | 0 | 0 | 0 | −24.09 | 0.79 | 0.92 |
| Q16576 | RBBP7 | 6\|6\|5 | 17 | 5.67 | 8\|7\|6 | 0 | 0 | 0 | 0 | 0 | −20.31 | 0.81 | 0.92 |
| P26639 | TARS | 34\|27\|38 | 99 | 33 | 37\|37\|34 | 0 | 0 | 0 | 0 | 0 | −91.49 | 0.92 | 0.92 |
| Q9NZB2 | FAM120A | 7\|8\|10 | 25 | 8.33 | 8\|8\|5 | 0 | 0 | 0 | 0 | 0 | −17.28 | 1.19 | 0.9 |
| P30479 | HLA-B | 3\|3\|3 | 9 | 3 | 5\|3\|2 | 0 | 0 | 0 | 0 | 0 | −10.17 | 0.9 | 0.92 |
| P13804-2 | ETFA | 5\|5\|3 | 13 | 4.33 | 5\|7\|7 | 0 | 0 | 0 | 0 | 0 | −21.43 | 0.68 | 0.92 |
| O60566 | BUB1B | 9\|9\|13 | 31 | 10.33 | 8\|11\|9 | 0 | 0 | 0 | 0 | 0 | −22.61 | 1.11 | 0.91 |
| Q9UBU9 | NXF1 | 11\|9\|9 | 29 | 9.67 | 8\|6\|10 | 0 | 0 | 0 | 0 | 0 | −17.91 | 1.21 | 0.9 |
| P30475 | HLA-B | 3\|4\|3 | 10 | 3.33 | 3\|4\|3 | 0 | 0 | 0 | 0 | 0 | −10.17 | 1 | 0.88 |
| Q13509 | TU883 | 54\|62\|65 | 181 | 60.33 | 62\|61\|59 | 0 | 0 | 0 | 0 | 0 | −138.54 | 0.99 | 0.92 |
| P61026 | RAB10 | 7\|7\|9 | 23 | 7.67 | 9\|9\|12 | 0 | 0 | 0 | 0 | 0 | −28.15 | 0.77 | 0.92 |
| P61020 | RAB58 | 6\|4\|4 | 14 | 4.67 | 6\|6\|7 | 0 | 0 | 0 | 0 | 0 | −19.55 | 0.74 | 0.92 |
| Q16719 | KYNU | 3\|3\|2 | 8 | 2.67 | 2\|2\|3 | 0 | 0 | 0 | 0 | 0 | −8.1 | 1.14 | 0.85 |
| Q7L576 | CYFIP1 | 4\|3\|4 | 11 | 3.67 | 3\|3\|3 | 0 | 0 | 0 | 0 | 0 | −8.99 | 1.22 | 0.86 |
| Q9UQE7 | SMC3 | 14\|11\|15 | 40 | 13.33 | 15\|12\|14 | 0 | 0 | 0 | 0 | 0 | −35.14 | 0.98 | 0.92 |
| P48634 | PRRC2A | 6\|6\|6 | 18 | 6 | 6\|4\|7 | 0 | 0 | 0 | 0 | 0 | −14.03 | 1.06 | 0.9 |
| Q96KR1 | ZFR | 14\|13\|13 | 40 | 13.33 | 17\|14\|12 | 0 | 0 | 0 | 0 | 0 | −34.44 | 0.93 | 0.92 |
| Q15286 | RAB35 | 4\|5\|6 | 15 | 5 | 5\|6\|4 | 0 | 0 | 0 | 0 | 0 | −14.57 | 3 | 0.89 |
| P61247 | RPS3A | 12\|9\|12 | 33 | 11 | 12\|12\|14 | 0 | 0 | 0 | 0 | 0 | −34.75 | 0.87 | 0.92 |
| Q13619 | CUL4A | 5\|6\|5 | 16 | 5.33 | 9\|10\|11 | 0 | 0 | 0 | 0 | 0 | −31.87 | 0.53 | 0.92 |
| P15313 | EZR | 6\|6\|8 | 20 | 6.67 | 3\|5\|4 | 0 | 0 | 0 | 0 | 0 | −8.2 | 1.67 | 0.84 |
| P60866 | RPS20 | 5\|3\|6 | 14 | 4.67 | 6\|4\|3 | 0 | 0 | 0 | 0 | 0 | −13.76 | 1.08 | 0.88 |
| Q9BQC3-2 | DPH2 | 0\|0\|2 | 2 | 0.67 | 2\|0\|3 | 0 | 0 | 0 | 0 | 0 | −9.13 | 0.4 | 0.84 |
| O00165-5 | HAX1 | 3\|4\|5 | 12 | 4 | 3\|3\|3 | 0 | 0 | 0 | 0 | 0 | −8.99 | 1.33 | 0.85 |
| P56537 | EIF6 | 8\|6\|4 | 18 | 6 | 6\|6\|6 | 0 | 0 | 0 | 0 | 0 | −18.27 | 1 | 0.9 |
| O14776-2 | TCERG1 | 0\|0\|2 | 2 | 0.67 | 2\|3\|0 | 0 | 0 | 0 | 0 | 0 | −9.13 | 0.4 | 0.84 |
| Q658J3 | POTEE | 22\|20\|22 | 64 | 21.33 | 22\|24\|19 | 0 | 0 | 0 | 0 | 0 | −50.15 | 0.98 | 0.92 |
| P29353 | SHC1 | 9\|8\|8 | 25 | 8.33 | 7\|6\|7 | 0 | 0 | 0 | 0 | 0 | −14.67 | 1.25 | 0.9 |
| Q12904 | AIMP1 | 4\|3\|2 | 9 | 3 | 5\|3\|5 | 0 | 0 | 0 | 0 | 0 | −15.55 | 0.69 | 0.92 |
| P49419-2 | ALDH7A1 | 6\|2\|5 | 13 | 4.33 | 7\|3\|5 | 0 | 0 | 0 | 0 | 0 | −18.16 | 0.87 | 0.89 |
| Q9UJW0 | DCTN4 | 3\|5\|3 | 11 | 3.67 | 4\|4\|5 | 0 | 0 | 0 | 0 | 0 | −13.76 | 0.85 | 0.89 |
| Q9BXY0 | MAK16 | 2\|0\|0 | 2 | 0.67 | 2\|2\|2 | 0 | 0 | 0 | 0 | 0 | −10.44 | 0.33 | 0.92 |
| Q9P035 | HACD3 | 0\|3\|2 | 5 | 1.67 | 3\|3\|3 | 0 | 0 | 0 | 0 | 0 | −14.75 | 0.56 | 0.92 |
| Q00341-2 | HDLBP | 6\|6\|7 | 19 | 6.33 | 7\|5\|6 | 0 | 0 | 0 | 0 | 0 | −15.21 | 1.06 | 0.9 |
| P27816 | MAP4 | 25\|20\|21 | 66 | 22 | 36\|33\|26 | 0 | 0 | 0 | 0 | 0 | −87.49 | 0.69 | 0.92 |
| Q12874 | SF3A3 | 15\|14\|14 | 43 | 14.33 | 15\|13\|16 | 0 | 0 | 0 | 0 | 0 | −34.15 | 0.98 | 0.92 |
| Q14203-3 | DCTN1 | 14\|17\|20 | 51 | 17 | 16\|13\|13 | 0 | 0 | 0 | 0 | 0 | −31.8 | 1.21 | 0.91 |
| Q13363-2 | CTBP1 | 3\|3\|2 | 8 | 2.67 | 4\|2\|3 | 0 | 0 | 0 | 0 | 0 | −10.42 | 0.89 | 0.92 |
| P51532-5 | SMARCA4 | 2\|4\|3 | 9 | 3 | 3\|4\|2 | 0 | 0 | 0 | 0 | 0 | −10.42 | 1 | 0.87 |
| Q93052 | LPP | 11\|13\|12 | 36 | 12 | 14\|8\|9 | 0 | 0 | 0 | 0 | 0 | −23.23 | 1.16 | 0.91 |
| P08754 | GNA13 | 5\|5\|3 | 13 | 4.33 | 6\|6\|7 | 0 | 0 | 0 | 0 | 0 | −21.43 | 0.68 | 0.92 |
| P31327 | CPS1 | 12\|109\|11 | 332 | 110.67 | 31\|130\|12 | 0 | 0 | 0 | 0 | 0 | −300.74 | 0.86 | 0.92 |
| P62937 | PPIA | 12\|12\|8 | 32 | 10.67 | 13\|16\|15 | 0 | 0 | 0 | 0 | 0 | −44.29 | 0.73 | 0.92 |
| P09622 | DLD | 12\|10\|9 | 31 | 10.33 | 10\|8\|9 | 0 | 0 | 0 | 0 | 0 | −21.43 | 1.15 | 0.91 |
| O43865 | AHCYL | 11\|6\|8 | 25 | 8.33 | 7\|8\|11 | 0 | 0 | 0 | 0 | 0 | −24.88 | 0.96 | 0.91 |
| P36776-2 | LONP1 | 5\|5\|8 | 18 | 6 | 6\|8\|11 | 0 | 0 | 0 | 0 | 0 | −25.39 | 0.72 | 0.92 |
| Q9Y314 | NOSIP | 7\|7\|6 | 20 | 6.67 | 6\|6\|5 | 0 | 0 | 0 | 0 | 0 | −14.03 | 1.18 | 0.9 |
| P46776 | RPL27A | 5\|6\|8 | 19 | 6.33 | 10\|5\|9 | 0 | 0 | 0 | 0 | 0 | −24.09 | 0.79 | 0.92 |
| Q8WXF1 | PSPC1 | 4\|2\|6 | 12 | 4 | 2\|3\|5 | 0 | 0 | 0 | 0 | 0 | −11.71 | 1.2 | 0.85 |
| P46778 | RPL21 | 25\|19\|20 | 64 | 21.33 | 29\|24\|21 | 0 | 0 | 0 | 0 | 0 | −62.68 | 0.86 | 0.92 |
| O60701-2 | UGDH | 8\|8\|6 | 22 | 7.33 | 6\|6\|7 | 0 | 0 | 0 | 0 | 0 | −16.39 | 1.16 | 0.9 |
| P43897 | TSFM | 2\|5\|7 | 14 | 4.67 | 4\|3\|7 | 0 | 0 | 0 | 0 | 0 | −16.88 | 3 | 0.88 |
| P52209-2 | PGD | 4\|2\|4 | 10 | 3.33 | 3\|2\|7 | 0 | 0 | 0 | 0 | 0 | −14.04 | 0.83 | 0.92 |
| Q3ZCQ8 | TIMM50 | 4\|4\|3 | 11 | 3.67 | 4\|6\|5 | 0 | 0 | 0 | 0 | 0 | −16.23 | 0.73 | 0.92 |
| P34896-2 | SHMT1 | 5\|4\|2 | 11 | 3.67 | 3\|4\|4 | 0 | 0 | 0 | 0 | 0 | −12.99 | 3 | 0.88 |
| Q6P2Q9 | PRPF8 | 19\|22\|21 | 62 | 20.67 | 30\|35\|35 | 0 | 0 | 0 | 0 | 0 | −95.88 | 0.62 | 0.92 |
| Q9H7E2-3 | TDRD3 | 3\|6\|3 | 12 | 4 | 6\|4\|5 | 0 | 0 | 0 | 0 | 0 | −16.23 | 0.8 | 0.89 |
| O75874 | IDH1 | 18\|16\|15 | 49 | 16.33 | 19\|14\|16 | 0 | 0 | 0 | 0 | 0 | −38.59 | 3 | 0.92 |
| Q92878 | RAD50 | 3\|4\|7 | 14 | 4.67 | 11\|7\|5 | 0 | 0 | 0 | 0 | 0 | −26.78 | 0.61 | 0.92 |
| Q15942 | ZYX | 4\|4\|7 | 15 | 5 | 6\|7\|6 | 0 | 0 | 0 | 0 | 0 | −19.55 | 0.79 | 0.9 |
| Q9Y3U8 | RPL36 | 4\|3\|4 | 11 | 3.67 | 2\|3\|4 | 0 | 0 | 0 | 0 | 0 | −8.99 | 1.22 | 0.86 |
| Q68CZ2 | TNS3 | 8\|4\|5 | 17 | 5.67 | 3\|4\|7 | 0 | 0 | 0 | 0 | 0 | −13.43 | 1.21 | 0.87 |
| Q14527 | HLTE | 3\|3\|4 | 10 | 3.33 | 2\|4\|3 | 0 | 0 | 0 | 0 | 0 | −8.99 | 1.11 | 0.87 |
| P62753 | RPS6 | 14\|16\|16 | 46 | 15.33 | 19\|16\|20 | 0 | 0 | 0 | 0 | 0 | −47.47 | 0.84 | 0.92 |
| P62750 | RPL23A | 6\|8\|9 | 23 | 7.67 | 11\|8\|9 | 0 | 0 | 0 | 0 | 0 | −27.4 | 0.82 | 0.92 |
| P22392 | NME2 | 2\|2\|2 | 6 | 2 | 3\|2\|2 | 0 | 0 | 0 | 0 | 0 | −8.1 | 0.86 | 0.92 |
| P04075 | ALDOA | 14\|15\|15 | 44 | 14.67 | 13\|13\|16 | 0 | 0 | 0 | 0 | 0 | −31.8 | 1.05 | 0.92 |
| P09104-2 | JENO2 | 0\|0\|2 | 2 | 0.67 | 0\|3\|5 | 0 | 0 | 0 | 0 | 0 | −13.16 | 0.25 | 0.92 |
| Q6UB35 | MTHFD1L | 7\|6\|6 | 19 | 6.33 | 5\|7\|6 | 0 | 0 | 0 | 0 | 0 | −15.21 | 1.06 | 0.9 |
| P00761 | P00761 | 28\|27\|24 | 79 | 26.33 | 31\|24\|25 | 0 | 0 | 0 | 0 | 0 | −62.02 | 0.99 | 0.92 |
| P41250 | GARS | 17\|20\|21 | 58 | 19.3 | 24\|29\|33 | 0 | 0 | 0 | 0 | 0 | −81.53 | 0.67 | 0.92 |
| P41252 | LARS | 5\|9\|10 | 24 | 8 | 12\|11\|15 | 0 | 0 | 0 | 0 | 0 | −42.6 | 0.63 | 0.92 |
| Q9YSY2 | NUBP2 | 3\|4\|2 | 9 | 3 | 6\|0\|5 | 0 | 0 | 0 | 0 | 0 | −12.66 | 0.82 | 0.88 |
| Q14697-2 | GANAB | 19\|21\|16 | 56 | 18.67 | 17\|17\|16 | 0 | 0 | 0 | 0 | 0 | −38.3 | 1.12 | 0.92 |
| Q13813-3 | SPTAN1 | 0\|5\|5 | 10 | 3.33 | 10\|11\|12 | 0 | 0 | 0 | 0 | 0 | −50.12 | 0.3 | 0.92 |
| Q9H487 | TUBB1 | 10\|11\|11 | 32 | 10.67 | 13\|11\|10 | 0 | 0 | 0 | 0 | 0 | −28.23 | 0.94 | 0.92 |
| P07355 | ANXA2 | 6\|6\|7 | 19 | 6.33 | 6\|5\|5 | 0 | 0 | 0 | 0 | 0 | −12.86 | 1.19 | 0.89 |
| P46821 | MAP1B | 5\|6\|3 | 14 | 4.67 | 7\|4\|9 | 0 | 0 | 0 | 0 | 0 | −22.76 | 0.7 | 0.92 |
| Q9H0A0 | NAT10 | 21\|18\|20 | 59 | 19.67 | 15\|19\|18 | 0 | 0 | 0 | 0 | 0 | −37.75 | 1.13 | 0.92 |
| O60341 | KDM1A | 3\|3\|3 | 9 | 3 | 4\|4\|2 | 0 | 0 | 0 | 0 | 0 | −10.17 | 0.9 | 0.92 |
| Q9NV06 | DCAF13 | 4\|4\|3 | 11 | 3.67 | 4\|4\|0 | 0 | 0 | 0 | 0 | 0 | −7.55 | 1.38 | 0.84 |
| P19367-4 | HK1 | 0\|2\|0 | 2 | 0.67 | 2\|2\|3 | 0 | 0 | 0 | 0 | 0 | −11.93 | 0.29 | 0.92 |
| P61019 | RAB2A | 6\|6\|6 | 18 | 6 | 4\|7\|7 | 0 | 0 | 0 | 0 | 0 | −15.21 | 3 | 0.92 |
| Q6DK11 | RPL7L1 | 4\|3\|3 | 10 | 3.33 | 3\|2\|3 | 0 | 0 | 0 | 0 | 0 | −7.81 | 1.25 | 0.85 |
| Q9NW82 | WDR70 | 2\|3\|3 | 8 | 2.67 | 4\|2\|3 | 0 | 0 | 0 | 0 | 0 | −10.42 | 0.89 | 0.92 |
| P58107 | EPPK1 | 25\|18\|23 | 66 | 22 | 32\|38\|32 | 0 | 0 | 0 | 0 | 0 | −100.51 | 0.65 | 0.92 |
| P07910-2 | HNRNPC | 6\|7\|6 | 19 | 6.33 | 12\|13\|8 | 0 | 0 | 0 | 0 | 0 | −33.83 | 0.58 | 0.92 |
| Q13618-2 | CUL3 | 5\|4\|4 | 13 | 4.33 | 6\|7\|4 | 0 | 0 | 0 | 0 | 0 | −17.06 | 0.76 | 0.92 |
| P36542 | ATP5C1 | 8\|4\|8 | 20 | 6.67 | 7\|8\|12 | 0 | 0 | 0 | 0 | 0 | −29.96 | 0.74 | 0.92 |
| Q66PJ3-7 | ARL6IP4 | 2\|2\|2 | 6 | 2 | 2\|2\|3 | 0 | 0 | 0 | 0 | 0 | −8.1 | 0.86 | 0.92 |
| Q9NR30 | DDX21 | 32\|35\|34 | 101 | 33.67 | 33\|30\|35 | 0 | 0 | 0 | 0 | 0 | −71.48 | 1.03 | 0.92 |
| P52789 | HK2 | 6\|4\|6 | 16 | 5.33 | 6\|5\|5 | 0 | 0 | 0 | 0 | 0 | −15.82 | 3 | 0.9 |
| P49736 | MCM2 | 11\|8\|12 | 31 | 10.33 | 10\|12\|12 | 0 | 0 | 0 | 0 | 0 | −31.46 | 0.91 | 0.91 |
| Q96QD8 | SLC38A2 | 0\|0\|2 | 2 | 0.67 | 2\|2\|2 | 0 | 0 | 0 | 0 | 0 | −10.44 | 0.33 | 0.92 |
| Q96L92 | SNX27 | 3\|3\|4 | 10 | 3.33 | 4\|2\|4 | 0 | 0 | 0 | 0 | 0 | −10.17 | 1 | 0.88 |
| Q9Y2L1 | DIS3 | 7\|9\|9 | 25 | 8.33 | 14\|10\|8 | 0 | 0 | 0 | 0 | 0 | −30.69 | 0.78 | 0.92 |
| Q92621 | NUP205 | 2\|5\|4 | 11 | 3.67 | 2\|3\|3 | 0 | 0.01 | 0 | 0.01 | 0 | −9.29 | 1.38 | 0.83 |
| Q15436 | SEC23A | 8\|4\|3 | 15 | 5 | 4\|4\|6 | 0 | 0 | 0 | 0 | 0 | −15.01 | 1.07 | 0.87 |
| P30466 | HLA-B | 3\|3\|3 | 9 | 3 | 4\|3\|2 | 0 | 0 | 0 | 0 | 0 | −8.99 | 1 | 0.92 |
| P30464 | HLA-B | 3\|4\|3 | 10 | 3.33 | 3\|4\|3 | 0 | 0 | 0 | 0 | 0 | −10.17 | 3 | 0.88 |
| P09960 | LTA4H | 0\|3\|3 | 6 | 2 | 3\|2\|4 | 0 | 0 | 0 | 0 | 0 | −14.75 | 0.67 | 0.92 |
| Q6NVY1 | HIBCH | 0\|2\|0 | 2 | 0.67 | 0\|3\|2 | 0 | 0 | 0 | 0 | 0 | −9.13 | 0.4 | 0.84 |
| P30084 | ECHS1 | 2\|0\|0 | 2 | 0.67 | 2\|2\|2 | 0 | 0 | 0 | 0 | 0 | −10.44 | 0.33 | 0.92 |
| O15027 | SEC16A | 18\|16\|23 | 57 | 19 | 20\|19\|22 | 0 | 0 | 0 | 0 | 0 | −51.57 | 0.93 | 0.92 |
| P20340 | RAB6A | 11\|12\|10 | 33 | 11 | 9\|10\|11 | 0 | 0 | 0 | 0 | 0 | −23.5 | 1.1 | 0.91 |
| Q0VDF9 | HSPA14 | 4\|2\|4 | 10 | 3.33 | 3\|5\|3 | 0 | 0 | 0 | 0 | 0 | −12.99 | 0.91 | 0.88 |
| O75746-2 | SLC25A12 | 6\|7\|4 | 17 | 5.67 | 6\|3\|5 | 0 | 0 | 0 | 0 | 0 | −13.43 | 1.21 | 0.88 |
| Q6P587 | FAHD1 | 3\|3\|2 | 8 | 2.67 | 3\|2\|3 | 0 | 0 | 0 | 0 | 0 | −9.29 | 1 | 0.86 |
| P23921 | RRM1 | 18\|16\|16 | 50 | 16.67 | 14\|16\|15 | 0 | 0 | 0 | 0 | 0 | −32.43 | 1.11 | 0.92 |
| Q96MU7-2 | YTHDC1 | 0\|0\|3 | 3 | 1 | 3\|3\|0 | 0 | 0 | 0 | 0 | 0 | −10.34 | 0.5 | 0.84 |
| O00299 | CLIC1 | 9\|8\|8 | 25 | 8.33 | 9\|7\|7 | 0 | 0 | 0 | 0 | 0 | −18.18 | 1.09 | 0.91 |
| O94925-3 | GLS | 4\|4\|0 | 8 | 2.67 | 3\|3\|6 | 0 | 0 | 0 | 0 | 0 | −19.11 | 0.67 | 0.92 |
| P31689 | DNAJA1 | 5\|4\|6 | 15 | 5 | 5\|4\|5 | 0 | 0 | 0 | 0 | 0 | −13.43 | 1.07 | 0.89 |
| P11802 | CDK4 | 3\|0\|4 | 7 | 2.33 | 3\|3\|3 | 0 | 0 | 0 | 0 | 0 | −14.75 | 0.78 | 0.87 |
| Q15046 | KARS | 3\|4\|5 | 12 | 4 | 9\|6\|8 | 0 | 0 | 0 | 0 | 0 | −26.78 | 0.52 | 0.92 |
| Q12789-3 | GTF3C1 | 3\|2\|2 | 7 | 2.33 | 3\|3\|2 | 0 | 0 | 0 | 0 | 0 | −9.29 | 0.88 | 0.87 |
| P02538 | KRT6A | 15\|14\|21 | 50 | 16.67 | 15\|15\|16 | 0 | 0 | 0 | 0 | 0 | −36.52 | 1.09 | 0.91 |
| P49915 | GMPS | 15\|14\|18 | 47 | 15.67 | 13\|15\|18 | 0 | 0 | 0 | 0 | 0 | −36.52 | 1.02 | 0.92 |
| P02533 | KRT14 | 23\|18\|22 | 63 | 21 | 25\|27\|26 | 0 | 0 | 0 | 0 | 0 | −69.41 | 0.81 | 0.92 |
| Q81WS0-5 | PHF6 | 3\|5\|5 | 13 | 4.33 | 4\|7\|5 | 0 | 0 | 0 | 0 | 0 | −17.53 | 0.81 | 0.92 |
| P04264 | KRT1 | 51\|40\|43 | 134 | 44.67 | 65\|62\|40 | 0 | 0 | 0 | 0 | 0 | −142.59 | 0.8 | 0.92 |
| Q9UJU6 | DBNL | 4\|3\|4 | 11 | 3.67 | 4\|4\|5 | 0 | 0 | 0 | 0 | 0 | −13.76 | 0.85 | 0.92 |
| Q01780 | EXOSC10 | 12\|11\|8 | 31 | 10.33 | 7\|9\|14 | 0 | 0 | 0 | 0 | 0 | −26.47 | 1.03 | 0.91 |
| O60502 | MGEAS | 7\|5\|5 | 17 | 5.67 | 6\|2\|7 | 0 | 0 | 0 | 0 | 0 | −13.07 | 1.13 | 0.89 |
| Q99426 | TBCB | 8\|11\|10 | 29 | 9.67 | 9\|8\|7 | 0 | 0 | 0 | 0 | 0 | −19.36 | 1.21 | 0.9 |
| P05198 | EIF2S1 | 13\|10\|13 | 36 | 12 | 18\|14\|15 | 0 | 0 | 0 | 0 | 0 | −44.38 | 0.77 | 0.92 |
| P07437 | TUBB | 10\|104\|12 | 336 | 112 | 15\|113\|11 | 0 | 0 | 0 | 0 | 0 | −255.26 | 0.98 | 0.92 |
| Q9Y490 | TLN1 | 7\|5\|7 | 19 | 6.33 | 6\|6\|5 | 0 | 0 | 0 | 0 | 0 | −15.5 | 1.12 | 0.9 |
| P78347-2 | GTF21 | 3\|5\|3 | 11 | 3.67 | 5\|12\|8 | 0 | 0 | 0 | 0 | 0 | −29.39 | 0.44 | 0.92 |
| P43246 | MSH2 | 13\|11\|11 | 35 | 11.67 | 10\|11\|17 | 0 | 0 | 0 | 0 | 0 | −31.54 | 0.92 | 0.92 |
| P43243 | MATR3 | 7\|8\|6 | 21 | 7 | 10\|7\|10 | 0 | 0 | 0 | 0 | 0 | −26.11 | 0.78 | 0.92 |
| P23381 | WARS | 24\|18\|19 | 61 | 20.33 | 19\|18\|18 | 0 | 0 | 0 | 0 | 0 | −41.27 | 1.11 | 0.92 |
| Q9NV17-2 | ATAD3A | 7\|6\|8 | 21 | 7 | 7\|7\|8 | 0 | 0 | 0 | 0 | 0 | −19.95 | 0.95 | 0.91 |
| P00374-2 | DHFR | 3\|3\|3 | 9 | 3 | 2\|3\|3 | 0 | 0 | 0 | 0 | 0 | −7.81 | 1.12 | 0.86 |
| P27707 | DCK | 2\|3\|2 | 7 | 2.33 | 2\|2\|2 | 0 | 0 | 0 | 0 | 0 | −6.91 | 1.17 | 0.84 |
| P27708 | CAD | 17\|19\|18 | 54 | 18 | 18\|22\|17 | 0 | 0 | 0 | 0 | 0 | −45.11 | 0.95 | 0.92 |
| Q8TEQ6 | GEMINS | 0\|0\|2 | 2 | 0.67 | 4\|2\|0 | 0 | 0 | 0 | 0 | 0 | −10.2 | 0.33 | 0.92 |
| P31946-2 | YWHAB | 7\|8\|13 | 28 | 9.33 | 8\|13\|14 | 0 | 0 | 0 | 0 | 0 | −34.53 | 0.8 | 0.91 |
| Q9Y4L1 | HYOU1 | 5\|6\|5 | 16 | 5.33 | 6\|6\|9 | 0 | 0 | 0 | 0 | 0 | −20.31 | 0.76 | 0.92 |
| Q9NQW6-1 | ANLN | 4\|5\|4 | 13 | 4.33 | 5\|4\|3 | 0 | 0 | 0 | 0 | 0 | −11.06 | 1.08 | 0.88 |
| O75600 | GCAT | 0\|0\|2 | 2 | 0.67 | 0\|2\|2 | 0 | 0.01 | 0 | 0.01 | 0 | −7.8 | 0.5 | 0.82 |
| P23258 | TUBG1 | 6\|7\|4 | 17 | 5.67 | 6\|4\|5 | 0 | 0 | 0 | 0 | 0 | −14.57 | 1.13 | 0.89 |
| Q81W19-3 | IMGA | 0\|2\|2 | 4 | 1.33 | 10\|17\|13 | 0 | 0 | 0 | 0 | 0 | −60.53 | 0.1 | 0.92 |
| Q14103-3 | HNRNPD | 21\|20\|21 | 62 | 20.67 | 24\|18\|20 | 0 | 0 | 0 | 0 | 0 | −46.6 | 1 | 0.92 |
| P20042 | EIF2S2 | 13\|11\|16 | 40 | 13.33 | 15\|14\|10 | 0 | 0 | 0 | 0 | 0 | −32.69 | 1.03 | 0.91 |
| Q9Y281-3 | CFL2 | 7\|7\|5 | 19 | 6.33 | 5\|6\|8 | 0 | 0 | 0 | 0 | 0 | −17.88 | 1 | 0.9 |
| P49207 | RPL34 | 3\|3\|4 | 10 | 3.33 | 5\|4\|3 | 0 | 0 | 0 | 0 | 0 | −12.5 | 0.83 | 0.92 |
| P41240 | CSK | 3\|3\|3 | 9 | 3 | 3\|3\|0 | 0 | 0 | 0 | 0 | 0 | −5.36 | 1.5 | 0.81 |
| Q9GZZ1 | NAASO | 5\|3\|6 | 14 | 4.67 | 4\|4\|5 | 0 | 0 | 0 | 0 | 0 | −13.76 | 1.08 | 0.88 |
| O94966-2 | USP19 | 3\|2\|3 | 8 | 2.67 | 4\|2\|0 | 0 | 0.01 | 0 | 0.01 | 0 | −6.67 | 1.33 | 0.82 |
| P25705 | ATPSA1 | 36\|26\|35 | 97 | 32.33 | 35\|37\|41 | 0 | 0 | 0 | 0 | 0 | −99.54 | 0.86 | 0.92 |
| O43615 | TIMM44 | 8\|6\|9 | 23 | 7.67 | 7\|6\|6 | 0 | 0 | 0 | 0 | 0 | −16.39 | 1.21 | 0.9 |
| Q8WWM7 | ATXN2L | 9\|8\|8 | 25 | 8.33 | 6\|5\|8 | 0 | 0 | 0 | 0 | 0 | −13.5 | 1.32 | 0.9 |
| P61313 | RPL15 | 9\|8\|8 | 25 | 8.33 | 13\|10\|10 | 0 | 0 | 0 | 0 | 0 | −30.19 | 0.76 | 0.92 |
| Q9HCM7 | FBRSL1 | 4\|4\|4 | 12 | 4 | 2\|4\|4 | 0 | 0 | 0 | 0 | 0 | −8.71 | 1.2 | 0.87 |
| P11498 | PC | 50\|845\|80 | 2501 | 833.67 | 56\|751\|76 | 0 | 0 | 0 | 0 | 0 | #NAME? | 1.1 | 0.92 |
| Q13263 | TRIM28 | 8\|7\|5 | 20 | 6.67 | 8\|8\|12 | 0 | 0 | 0 | 0 | 0 | −29.27 | 0.71 | 0.92 |
| Q16822 | PCK2 | 2\|0\|2 | 4 | 1.33 | 4\|4\|4 | 0 | 0 | 0 | 0 | 0 | −19.11 | 0.33 | 0.92 |
| O75131 | CPNE3 | 6\|6\|7 | 19 | 6.33 | 9\|5\|4 | 0 | 0 | 0 | 0 | 0 | −15.24 | 1.06 | 0.9 |
| P61006 | RAB8A | 9\|9\|10 | 28 | 9.33 | 8\|7\|7 | 0 | 0 | 0 | 0 | 0 | −15.57 | 1.27 | 0.9 |
| P53621 | COPA | 17\|18\|13 | 48 | 16 | 24\|16\|21 | 0 | 0 | 0 | 0 | 0 | −56.79 | 0.79 | 0.92 |
| O95453-4 | PARN | 2\|0\|0 | 2 | 0.67 | 2\|2\|2 | 0 | 0 | 0 | 0 | 0 | −10.44 | 0.33 | 0.92 |
| P22626 | HNRNPA281 | 4\|2\|4 | 10 | 3.33 | 2\|5\|5 | 0 | 0 | 0 | 0 | 0 | −14.21 | 0.83 | 0.92 |
| Q6YN16-2 | HSDL2 | 3\|4\|3 | 10 | 3.33 | 3\|0\|4 | 0 | 0.01 | 0 | 0.01 | 0 | −6.41 | 1.43 | 0.82 |
| Q15029-2 | EFTUD2 | 12\|9\|10 | 31 | 10.33 | 22\|19\|22 | 0 | 0 | 0 | 0 | 0 | −67.49 | 0.49 | 0.92 |
| Q7L2E3-3 | DHX30 | 13\|9\|10 | 32 | 10.67 | 13\|8\|10 | 0 | 0 | 0 | 0 | 0 | −26.16 | 1.03 | 0.91 |
| P54136 | RARS | 16\|13\|12 | 41 | 13.67 | 13\|13\|13 | 0 | 0 | 0 | 0 | 0 | −31.17 | 1.05 | 0.91 |
| Q02952-3 | AKAP12 | 5\|7\|7 | 19 | 6.33 | 4\|4\|6 | 0 | 0 | 0 | 0 | 0 | −11.96 | 1.36 | 0.88 |
| Q96PV6 | LENG8 | 2\|2\|3 | 7 | 2.33 | 2\|2\|2 | 0 | 0 | 0 | 0 | 0 | −6.91 | 1.17 | 0.84 |
| Q06830 | PRDX1 | 9\|8\|8 | 25 | 8.33 | 6\|5\|6 | 0 | 0 | 0 | 0 | 0 | −11.18 | 1.47 | 0.88 |
| O00116 | AGPS | 4\|6\|4 | 14 | 4.67 | 6\|5\|7 | 0 | 0 | 0 | 0 | 0 | −18.27 | 0.78 | 0.92 |
| Q03519-2 | TAP2 | 3\|0\|3 | 6 | 2 | 4\|2\|0 | 0 | 0.01 | 0 | 0.01 | 0 | −10.2 | 1 | 0.82 |
| P30520 | ADSS | 5\|5\|7 | 17 | 5.67 | 8\|6\|8 | 0 | 0 | 0 | 0 | 0 | −21.58 | 0.77 | 0.92 |
| Q15428 | SF3A2 | 4\|4\|6 | 14 | 4.67 | 3\|5\|10 | 0 | 0 | 0 | 0 | 0 | −17.98 | 0.78 | 0.92 |
| P10155-3 | TROVE2 | 3\|3\|2 | 8 | 2.67 | 2\|3\|2 | 0 | 0 | 0 | 0 | 0 | −8.1 | 1.14 | 0.85 |
| P49588 | AARS | 8\|6\|6 | 20 | 6.67 | 11\|10\|11 | 0 | 0 | 0 | 0 | 0 | −32.54 | 0.63 | 0.92 |
| Q9HCC0 | MCCC2 | 27\|34\|29 | 90 | 30 | 29\|26\|25 | 0 | 0 | 0 | 0 | 0 | −57.59 | 1.12 | 0.92 |
| P30419 | NMT1 | 3\|3\|7 | 13 | 4.33 | 5\|2\|4 | 0 | 0 | 0 | 0 | 0 | −11.36 | 1.18 | 0.85 |
| Q14498-2 | RBM39 | 7\|4\|6 | 17 | 5.67 | 7\|4\|9 | 0 | 0 | 0 | 0 | 0 | −20.83 | 0.85 | 0.91 |
| P60842 | EIF4A1 | 60\|59\|55 | 174 | 58 | 64\|70\|69 | 0 | 0 | 0 | 0 | 0 | −162.55 | 0.86 | 0.92 |
| P47755 | CAPZA2 | 4\|5\|5 | 14 | 4.67 | 4\|5\|6 | 0 | 0 | 0 | 0 | 0 | −14.57 | 0.93 | 0.92 |
| Q8TDD1 | DDX54 | 5\|3\|3 | 11 | 3.67 | 2\|5\|3 | 0 | 0 | 0 | 0 | 0 | −10.17 | 1.1 | 0.87 |
| P48507 | GCLM | 5\|5\|5 | 15 | 5 | 4\|2\|3 | 0 | 0 | 0 | 0 | 0 | −6.14 | 1.67 | 0.83 |
| P06733 | ENO1 | 87\|83\|96 | 266 | 88.67 | 85\|94\|105 | 0 | 0 | 0 | 0 | 0 | −216.72 | 0.94 | 0.92 |
| Q9BRX2 | PELO | 6\|7\|6 | 19 | 6.33 | 6\|5\|7 | 0 | 0 | 0 | 0 | 0 | −15.21 | 1.06 | 0.9 |
| Q96D46 | INMD3 | 5\|6\|4 | 15 | 5 | 6\|6\|6 | 0 | 0 | 0 | 0 | 0 | −18.27 | 0.83 | 0.92 |
| O15160 | POLRIC | 5\|6\|7 | 18 | 6 | 4\|5\|6 | 0 | 0 | 0 | 0 | 0 | −13.14 | 1.2 | 0.89 |
| P51659 | HSD1784 | 3\|5\|5 | 13 | 4.33 | 7\|7\|8 | 0 | 0 | 0 | 0 | 0 | −25.42 | 0.59 | 0.92 |
| P60900-2 | PSMA6 | 4\|3\|3 | 10 | 3.33 | 4\|4\|2 | 0 | 0 | 0 | 0 | 0 | −10.17 | 1 | 0.88 |
| P56192 | MARS | 6\|7\|7 | 20 | 6.67 | 7\|8\|15 | 0 | 0 | 0 | 0 | 0 | −29.72 | 0.67 | 0.92 |
| P35573-2 | AGL | 0\|2\|0 | 2 | 0.67 | 2\|2\|0 | 0 | 0.01 | 0 | 0.01 | 0 | −7.8 | 0.5 | 0.82 |
| P20700 | LMNB1 | 22\|21\|20 | 63 | 21 | 17\|21\|19 | 0 | 0 | 0 | 0 | 0 | −40.72 | 1.11 | 0.92 |
| P55884 | EIF3B | 3\|3\|3 | 9 | 3 | 2\|3\|2 | 0 | 0 | 0 | 0 | 0 | −6.63 | 1.29 | 0.84 |
| Q01650 | SLC7A5 | 6\|5\|5 | 16 | 5.33 | 8\|5\|4 | 0 | 0 | 0 | 0 | 0 | −15.5 | 0.94 | 0.9 |
| P07737 | PFN1 | 48\|45\|45 | 138 | 46 | 48\|47\|45 | 0 | 0 | 0 | 0 | 0 | −101.98 | 0.99 | 0.92 |
| P08779 | KRT16 | 15\|12\|18 | 45 | 15 | 15\|23\|19 | 0 | 0 | 0 | 0 | 0 | −53.5 | 0.79 | 0.92 |
| P52294 | KPNA1 | 0\|3\|3 | 6 | 2 | 3\|2\|4 | 0 | 0 | 0 | 0 | 0 | −14.75 | 0.67 | 0.92 |
| P52292 | KPNA2 | 5\|7\|5 | 17 | 5.67 | 4\|0\|7 | 0 | 0 | 0 | 0 | 0 | −7.94 | 1.55 | 0.84 |
| P00966 | ASS1 | 33\|33\|34 | 100 | 33.33 | 30\|41\|39 | 0 | 0 | 0 | 0 | 0 | −84.25 | 0.91 | 0.92 |
| P62910 | RPL32 | 8\|6\|7 | 21 | 7 | 7\|5\|6 | 0 | 0 | 0 | 0 | 0 | −15.21 | 1.17 | 0.9 |
| P14618-2 | PKM | 69\|60\|67 | 196 | 65.33 | 72\|62\|72 | 0 | 0 | 0 | 0 | 0 | −158.2 | 0.95 | 0.92 |
| Q03518 | TAP1 | 4\|3\|2 | 9 | 3 | 3\|4\|3 | 0 | 0 | 0 | 0 | 0 | −11.71 | 0.9 | 0.88 |
| P62917 | RPL8 | 12\|8\|11 | 31 | 10.33 | 10\|6\|9 | 0 | 0 | 0 | 0 | 0 | −20.53 | 1.24 | 0.9 |
| O00425 | IGF2BP3 | 7\|6\|8 | 21 | 7 | 11\|10\|10 | 0 | 0 | 0 | 0 | 0 | −31.24 | 0.68 | 0.92 |
| Q10471 | GALNT2 | 3\|4\|4 | 11 | 3.67 | 5\|3\|4 | 0 | 0 | 0 | 0 | 0 | −12.5 | 0.92 | 0.92 |
| Q00796 | SORD | 5\|4\|5 | 14 | 4.67 | 3\|4\|3 | 0 | 0 | 0 | 0 | 0 | −8.71 | 1.4 | 0.86 |
| Q9H0U4 | RAB18 | 16\|18\|18 | 52 | 17.33 | 16\|19\|18 | 0 | 0 | 0 | 0 | 0 | −41.86 | 0.98 | 0.92 |
| O00743-2 | PPP6C | 3\|3\|2 | 8 | 2.67 | 2\|3\|3 | 0 | 0 | 0 | 0 | 0 | −9.29 | 1 | 0.86 |
| P23396 | RPS3 | 28\|26\|29 | 83 | 27.67 | 32\|35\|35 | 0 | 0 | 0 | 0 | 0 | −85.71 | 0.81 | 0.92 |
| P35658-2 | INUP214 | 26\|22\|26 | 74 | 24.67 | 22\|26\|25 | 0 | 0 | 0 | 0 | 0 | −56.67 | 1.01 | 0.92 |
| P35268 | RPL22 | 5\|7\|8 | 20 | 6.67 | 7\|7\|7 | 0 | 0 | 0 | 0 | 0 | −20.31 | 0.95 | 0.91 |
| Q71U36-2 | TUBA1A | 81\|71\|75 | 227 | 75.67 | 77\|72\|76 | 0 | 0 | 0 | 0 | 0 | −164.18 | 1.01 | 0.92 |
| Q10713 | PMPCA | 4\|3\|3 | 10 | 3.33 | 3\|5\|4 | 0 | 0 | 0 | 0 | 0 | −12.5 | 0.83 | 0.92 |
| P00367 | GLUD1 | 0\|3\|3 | 6 | 2 | 2\|3\|3 | 0 | 0 | 0 | 0 | 0 | −13.39 | 0.75 | 0.86 |
| Q9UKN8 | GTF3C4 | 5\|5\|5 | 15 | 5 | 4\|5\|7 | 0 | 0 | 0 | 0 | 0 | −14.32 | 0.94 | 0.92 |
| P00568 | AK1 | 3\|2\|0 | 5 | 1.67 | 2\|2\|3 | 0 | 0 | 0 | 0 | 0 | −11.93 | 0.71 | 0.86 |
| Q3KQU3-4 | MAP7D1 | 7\|5\|5 | 17 | 5.67 | 8\|7\|9 | 0 | 0 | 0 | 0 | 0 | −24.09 | 0.71 | 0.92 |
| Q92499 | DDX1 | 13\|11\|9 | 33 | 11 | 6\|12\|10 | 0 | 0 | 0 | 0 | 0 | −22.61 | 1.18 | 0.91 |
| P11940-2 | PABPC1 | 5\|2\|6 | 13 | 4.33 | 4\|6\|5 | 0 | 0 | 0 | 0 | 0 | −18.16 | 0.87 | 0.89 |
| P28288 | ABCD3 | 4\|4\|8 | 16 | 5.33 | 4\|6\|6 | 0 | 0 | 0 | 0 | 0 | −15.82 | 1 | 0.89 |
| P23246 | SFPQ | 27\|28\|24 | 79 | 26.33 | 26\|23\|27 | 0 | 0 | 0 | 0 | 0 | −57.25 | 1.04 | 0.92 |
| Q7KZF4 | SND1 | 34\|30\|37 | 101 | 33.67 | 33\|32\|37 | 0 | 0 | 0 | 0 | 0 | −79.24 | 0.99 | 0.92 |
| P24752 | ACAT1 | 14\|12\|16 | 42 | 14 | 14\|12\|10 | 0 | 0 | 0 | 0 | 0 | −27.65 | 1.17 | 0.91 |
| Q99714 | HSD17810 | 2\|0\|3 | 5 | 1.67 | 2\|2\|2 | 0 | 0 | 0 | 0 | 0 | −10.44 | 0.83 | 0.84 |
| Q9H307 | PNN | 3\|0\|2 | 5 | 1.67 | 3\|6\|3 | 0 | 0 | 0 | 0 | 0 | −19.11 | 0.42 | 0.92 |
| Q14157-1 | UBAP2L | 11\|8\|15 | 34 | 11.33 | 17\|6\|14 | 0 | 0 | 0 | 0 | 0 | −34.88 | 0.92 | 0.91 |
| P52701 | MSH6 | 5\|5\|9 | 19 | 6.33 | 7\|4\|4 | 0 | 0 | 0 | 0 | 0 | −13.14 | 1.27 | 0.87 |
| Q5T9A4 | ATAD3B | 7\|5\|5 | 17 | 5.67 | 5\|5\|5 | 0 | 0 | 0 | 0 | 0 | −13.14 | 1.13 | 0.89 |
| P43686-2 | PSMC4 | 7\|6\|8 | 21 | 7 | 5\|7\|6 | 0 | 0 | 0 | 0 | 0 | −15.21 | 1.17 | 0.9 |
| Q14166 | TTLL12 | 7\|8\|7 | 22 | 7.33 | 8\|5\|9 | 0 | 0 | 0 | 0 | 0 | −18.46 | 1 | 0.91 |
| Q14160 | SCRIB | 0\|0\|2 | 2 | 0.67 | 3\|5\|0 | 0 | 0 | 0 | 0 | 0 | −13.16 | 0.25 | 0.92 |
| P10809 | HSPD1 | 24\|21\|23 | 68 | 22.67 | 24\|19\|27 | 0 | 0 | 0 | 0 | 0 | −54.6 | 0.97 | 0.92 |
| Q7Z6E9-2 | RBBP6 | 2\|3\|4 | 9 | 3 | 10\|10\|12 | 0 | 0 | 0 | 0 | 0 | −41.8 | 0.28 | 0.92 |
| Q08499-6 | PDE4D | 0\|0\|2 | 2 | 0.67 | 2\|0\|2 | 0 | 0.01 | 0 | 0.01 | 0 | −7.8 | 0.5 | 0.82 |
| Q16836 | HADH | 4\|3\|4 | 11 | 3.67 | 6\|6\|3 | 0 | 0 | 0 | 0 | 0 | −16.23 | 0.73 | 0.92 |
| Q9UJU6-2 | DBNL | 4\|3\|4 | 11 | 3.67 | 4\|4\|5 | 0 | 0 | 0 | 0 | 0 | −13.76 | 0.85 | 0.92 |
| Q16543 | CDC37 | 5\|4\|7 | 16 | 5.33 | 5\|6\|4 | 0 | 0 | 0 | 0 | 0 | −14.57 | 1.07 | 0.89 |
| Q13257 | MAD2L1 | 3\|2\|2 | 7 | 2.33 | 3\|2\|4 | 0 | 0 | 0 | 0 | 0 | −10.42 | 0.78 | 0.92 |
| P49368 | CCT3 | 33\|31\|38 | 102 | 34 | 36\|36\|41 | 0 | 0 | 0 | 0 | 0 | −91.04 | 0.9 | 0.92 |
| P32119 | PRDX2 | 5\|5\|4 | 14 | 4.67 | 6\|5\|3 | 0 | 0 | 0 | 0 | 0 | −13.43 | 1 | 0.89 |
| O07866-8 | KLC1 | 5\|4\|3 | 12 | 4 | 3\|4\|2 | 0 | 0 | 0 | 0 | 0 | −8.99 | 1.33 | 0.85 |
| P19013 | KRT4 | 3\|3\|4 | 10 | 3.33 | 4\|2\|3 | 0 | 0 | 0 | 0 | 0 | −8.99 | 1.11 | 0.87 |
| P26196 | DDX6 | 6\|6\|3 | 15 | 5 | 4\|5\|4 | 0 | 0 | 0 | 0 | 0 | −13.76 | 1.15 | 0.88 |
| P61073 | CXCR4 | 2\|2\|2 | 6 | 2 | 3\|2\|2 | 0 | 0 | 0 | 0 | 0 | −8.1 | 0.86 | 0.92 |
| Q9BUQ8 | DDX23 | 3\|4\|5 | 12 | 4 | 8\|2\|7 | 0 | 0 | 0 | 0 | 0 | −18.67 | 0.71 | 0.92 |
| Q9BWE0 | REPIN1 | 5\|5\|2 | 12 | 4 | 5\|3\|4 | 0 | 0 | 0 | 0 | 0 | −14.21 | 1 | 0.88 |
| Q9BWD1 | ACAT2 | 12\|9\|11 | 32 | 10.67 | 13\|10\|11 | 0 | 0 | 0 | 0 | 0 | −29.79 | 0.94 | 0.91 |
| Q9Y5M8 | SRPRB | 5\|4\|6 | 15 | 5 | 6\|5\|4 | 0 | 0 | 0 | 0 | 0 | −14.57 | 1 | 0.89 |
| P33992 | MCM5 | 18\|16\|15 | 49 | 16.33 | 18\|15\|20 | 0 | 0 | 0 | 0 | 0 | −43.4 | 0.92 | 0.92 |
| P33993 | MCM7 | 29\|25\|29 | 83 | 27.67 | 29\|32\|31 | 0 | 0 | 0 | 0 | 0 | −75.01 | 0.9 | 0.92 |
| P33991 | MCM4 | 18\|16\|19 | 53 | 17.67 | 19\|21\|12 | 0 | 0 | 0 | 0 | 0 | −40.64 | 1.02 | 0.92 |
| P50914 | RPL14 | 3\|0\|0 | 3 | 3 | 3\|5\|5 | 0 | 0 | 0 | 0 | 0 | −20.61 | 0.23 | 0.92 |
| P49755 | TMED10 | 2\|3\|2 | 7 | 2.33 | 3\|4\|6 | 0 | 0 | 0 | 0 | 0 | −15.55 | 0.54 | 0.92 |
| P49756 | RBM25 | 2\|3\|0 | 5 | 1.67 | 4\|5\|4 | 0 | 0 | 0 | 0 | 0 | −20.61 | 0.38 | 0.92 |
| P61106 | RAB14 | 12\|19\|15 | 46 | 15.33 | 14\|16\|18 | 0 | 0 | 0 | 0 | 0 | −42.12 | 0.96 | 0.92 |
| O43242 | PSMD3 | 13\|14\|10 | 37 | 12.33 | 9\|15\|14 | 0 | 0 | 0 | 0 | 0 | −33.08 | 0.97 | 0.92 |
| P49591 | SARS | 3\|4\|2 | 9 | 3 | 5\|4\|6 | 0 | 0 | 0 | 0 | 0 | −18.16 | 0.6 | 0.92 |
| Q86V48-2 | LUZP1 | 3\|2\|0 | 5 | 1.67 | 4\|4\|7 | 0 | 0 | 0 | 0 | 0 | −23.5 | 0.33 | 0.92 |
| P61586 | RHOA | 3\|2\|5 | 10 | 3.33 | 4\|4\|5 | 0 | 0 | 0 | 0 | 0 | −15.55 | 0.77 | 0.89 |
| Q9H0D6 | XRN2 | 5\|6\|6 | 17 | 5.67 | 5\|7\|5 | 0 | 0 | 0 | 0 | 0 | −15.5 | 1 | 0.9 |
| O43172-2 | PRPF4 | 10\|7\|8 | 25 | 8.33 | 9\|8\|10 | 0 | 0 | 0 | 0 | 0 | −24.43 | 0.93 | 0.91 |
| Q72417 | NUFIP2 | 7\|6\|6 | 19 | 6.33 | 4\|8\|5 | 0 | 0 | 0 | 0 | 0 | −14.03 | 1.12 | 0.9 |
| P16401 | HIST1H1B | 12\|4\|6 | 22 | 7.33 | 8\|6\|5 | 0 | 0 | 0 | 0 | 0 | −19.55 | 1.16 | 0.87 |
| Q9UBX3 | SLC25A10 | 6\|7\|5 | 18 | 6 | 2\|5\|4 | 0 | 0 | 0 | 0 | 0 | −8.45 | 1.64 | 0.84 |
| Q9HC07 | TMEM165 | 3\|2\|2 | 7 | 2.33 | 2\|3\|3 | 0 | 0 | 0 | 0 | 0 | −9.29 | 0.88 | 0.87 |
| Q9NR12 | PDLIM7 | 12\|12\|11 | 35 | 11.67 | 13\|12\|10 | 0 | 0 | 0 | 0 | 0 | −27.93 | 1 | 0.91 |
| P28838-2 | LAP3 | 6\|7\|7 | 20 | 6.67 | 5\|6\|6 | 0 | 0 | 0 | 0 | 0 | −14.03 | 1.18 | 0.9 |
| Q8WVV9-5 | HNRNPLL | 3\|0\|2 | 5 | 1.67 | 3\|2\|3 | 0 | 0 | 0 | 0 | 0 | −13.39 | 0.63 | 0.87 |
| P35613-2 | BSG | 6\|6\|6 | 18 | 6 | 5\|7\|5 | 0 | 0 | 0 | 0 | 0 | −14.03 | 1.06 | 0.9 |
| Q9NP92 | MRPS30 | 2\|2\|0 | 4 | 1.33 | 0\|2\|3 | 0 | 0 | 0 | 0 | 0 | −9.13 | 0.8 | 0.83 |
| Q86X55-1 | CARM1 | 6\|6\|5 | 17 | 5.67 | 5\|5\|2 | 0 | 0 | 0 | 0 | 0 | −9.61 | 1.42 | 0.87 |
| O95782-2 | AP2A1 | 6\|5\|6 | 17 | 5.67 | 6\|5\|7 | 0 | 0 | 0 | 0 | 0 | −16.65 | 0.94 | 0.92 |
| O94979-6 | SEC31A | 8\|6\|9 | 23 | 7.67 | 4\|12\|9 | 0 | 0 | 0 | 0 | 0 | −23.4 | 0.92 | 0.91 |
| Q96HN2-2 | AHCYL2 | 6\|5\|4 | 15 | 5 | 7\|6\|5 | 0 | 0 | 0 | 0 | 0 | −18.27 | 0.83 | 0.92 |
| Q96IU4 | ABHD14B | 3\|3\|2 | 8 | 2.67 | 2\|3\|2 | 0 | 0 | 0 | 0 | 0 | −8.1 | 1.14 | 0.85 |
| Q9BW92 | TARS2 | 4\|4\|3 | 11 | 3.67 | 3\|2\|3 | 0 | 0 | 0 | 0 | 0 | −7.81 | 1.38 | 0.84 |
| P27824 | CANX | 10\|8\|9 | 27 | 9 | 6\|6\|8 | 0 | 0 | 0 | 0 | 0 | −14.67 | 1.35 | 0.89 |
| P40763-3 | STAT3 | 15\|10\|13 | 38 | 12.67 | 14\|10\|14 | 0 | 0 | 0 | 0 | 0 | −33.08 | 3 | 0.91 |
| P62906 | RPL10A | 7\|9\|8 | 24 | 8 | 10\|11\|11 | 0 | 0 | 0 | 0 | 0 | −30.69 | 0.75 | 0.92 |
| P83731 | RPL24 | 7\|7\|8 | 22 | 7.33 | 6\|5\|7 | 0 | 0 | 0 | 0 | 0 | −13.76 | 1.22 | 0.9 |
| P40616-2 | ARL0 | 2\|2\|2 | 6 | 2 | 2\|5\|5 | 0 | 0 | 0 | 0 | 0 | −14.21 | 0.5 | 0.92 |
| P28070 | PSMB4 | 5\|5\|3 | 13 | 4.33 | 4\|3\|4 | 0 | 0 | 0 | 0 | 0 | −11.36 | 1.18 | 0.87 |
| P28072 | PSMB6 | 2\|3\|2 | 7 | 2.33 | 3\|3\|2 | 0 | 0 | 0 | 0 | 0 | −9.29 | 0.88 | 0.87 |
| Q15393 | SF3B3 | 6\|5\|6 | 17 | 5.67 | 7\|4\|2 | 0 | 0 | 0 | 0 | 0 | −10.69 | 1.31 | 0.88 |
| Q9Y2W1 | THRAP3 | 4\|6\|8 | 18 | 6 | 6\|9\|8 | 0 | 0 | 0 | 0 | 0 | −24.7 | 0.78 | 0.91 |
| O60563 | CCNT1 | 4\|6\|3 | 13 | 4.33 | 5\|4\|6 | 0 | 0 | 0 | 0 | 0 | −16.23 | 0.87 | 0.89 |
| Q9UMR2 | DDX19B | 11\|7\|7 | 25 | 8.33 | 7\|2\|7 | 0 | 0 | 0 | 0 | 0 | −11.32 | 1.56 | 0.85 |
| P35908 | KRT2 | 48\|31\|34 | 113 | 37.67 | 40\|51\|33 | 0 | 0 | 0 | 0 | 0 | −104.43 | 0.91 | 0.92 |
| Q81Y37 | DHX37 | 2\|2\|0 | 4 | 1.33 | 2\|2\|2 | 0 | 0 | 0 | 0 | 0 | −10.44 | 0.67 | 0.92 |
| P53004 | BLVRA | 5\|2\|3 | 10 | 3.33 | 4\|2\|3 | 0 | 0 | 0 | 0 | 0 | −10.42 | 1.11 | 0.85 |
| Q8N6H7 | ARFGAP2 | 5\|6\|7 | 18 | 6 | 5\|4\|3 | 0 | 0 | 0 | 0 | 0 | −9.61 | 1.5 | 0.86 |
| Q9Y305-3 | ACOT9 | 7\|6\|5 | 18 | 6 | 5\|7\|3 | 0 | 0 | 0 | 0 | 0 | −13.14 | 1.2 | 0.89 |
| P00558 | PGK1 | 27\|33\|31 | 91 | 30.33 | 31\|29\|28 | 0 | 0 | 0 | 0 | 0 | −67.03 | 1.03 | 0.92 |
| Q9Y220-2 | SUGT1 | 2\|2\|2 | 6 | 2 | 2\|3\|4 | 0 | 0 | 0 | 0 | 0 | −10.42 | 0.67 | 0.92 |
| Q14137-2 | BOP1 | 3\|2\|4 | 9 | 3 | 0\|4\|4 | 0 | 0 | 0 | 0 | 0 | −9.13 | 1.12 | 0.85 |
| Q14258 | TRIM25 | 9\|7\|7 | 23 | 7.67 | 8\|8\|9 | 0 | 0 | 0 | 0 | 0 | −22.02 | 0.92 | 0.91 |
| Q9BY77-2 | POLDIP3 | 2\|0\|2 | 4 | 1.33 | 3\|2\|3 | 0 | 0 | 0 | 0 | 0 | −13.39 | 0.5 | 0.92 |
| Q05048 | CSTF1 | 4\|5\|5 | 14 | 4.67 | 4\|5\|4 | 0 | 0 | 0 | 0 | 0 | −12.24 | 1.08 | 0.89 |
| Q5VT06 | CEP350 | 19\|17\|22 | 58 | 19.33 | 35\|43\|36 | 0 | 0 | 0 | 0 | 0 | −118.64 | 0.51 | 0.92 |
| P09382 | LGALS1 | 3\|2\|3 | 8 | 2.67 | 3\|3\|4 | 0 | 0 | 0 | 0 | 0 | −11.71 | 0.8 | 0.92 |
| P53396 | ACLY | 35\|34\|35 | 104 | 34.67 | 44\|42\|45 | 0 | | 0 | 0 | 0 | −108.31 | 0.79 | 0.92 |
| Q99700-2 | ATXN2 | 6\|2\|4 | 12 | 4 | 4\|3\|3 | 0 | 0 | 0 | 0 | 0 | −11.71 | 1.2 | 0.85 |
| P41227 | NAA10 | 6\|4\|4 | 14 | 4.67 | 5\|3\|6 | 0 | 0 | 0 | 0 | 0 | −13.43 | 1 | 0.89 |
| P29353-3 | SHC3 | 9\|8\|8 | 25 | 8.33 | 6\|6\|8 | 0 | 0 | 0 | 0 | 0 | −14.67 | 1.25 | 0.9 |
| O75717 | WDHD1 | 2\|0\|2 | 4 | 1.33 | 0\|3\|5 | 0 | 0 | 0 | 0 | 0 | −13.16 | 0.5 | 0.92 |
| P47897-2 | QARS | 3\|3\|0 | 6 | 2 | 4\|5\|0 | 0 | 0 | 0 | 0 | 0 | −14.43 | 0.67 | 0.92 |
| Q81WVR0 | ZC3H7A | 4\|5\|2 | 11 | 3.67 | 3\|4\|3 | 0 | 0 | 0 | 0 | 0 | −11.71 | 1.1 | 0.86 |
| Q02809 | PLOD1 | 11\|10\|10 | 31 | 10.33 | 11\|8\|7 | 0 | 0 | 0 | 0 | 0 | −18.81 | 1.19 | 0.91 |
| P06899 | HIST1H2BJ | 4\|5\|5 | 14 | 4.67 | 6\|9\|6 | 0 | 0 | 0 | 0 | 0 | −22.08 | 0.67 | 0.92 |
| P07384 | CAPN1 | 3\|2\|0 | 5 | 1.67 | 4\|5\|0 | 0 | 0 | 0 | 0 | 0 | −14.43 | 0.56 | 0.92 |
| Q9NZ01 | TECR | 6\|5\|5 | 16 | 5.33 | 5\|5\|5 | 0 | 0 | 0 | 0 | 0 | −13.14 | 1.07 | 0.89 |
| Q16531 | DDB1 | 8\|4\|4 | 16 | 5.33 | 3\|5\|8 | 0 | 0 | 0 | 0 | 0 | −15.83 | 1 | 0.89 |
| P06576 | ATPSB | 7\|5\|8 | 20 | 6.67 | 9\|9\|11 | 0 | 0 | 0 | 0 | 0 | −30.58 | 0.69 | 0.92 |
| O75150 | RNF40 | 7\|7\|5 | 19 | 6.33 | 4\|4\|5 | 0 | 0 | 0 | 0 | 0 | −10.78 | 1.46 | 0.87 |
| O75153 | CLUH | 5\|3\|6 | 14 | 4.67 | 8\|4\|5 | 0 | 0 | 0 | 0 | 0 | −18.83 | 0.82 | 0.9 |
| O75152 | ZC3H11A | 2\|3\|0 | 5 | 1.67 | 2\|3\|3 | 0 | 0 | 0 | 0 | 0 | −13.39 | 0.63 | 0.87 |
| Q02218-2 | OGDH | 2\|0\|2 | 4 | 1.33 | 2\|4\|5 | 0 | 0 | 0 | 0 | 0 | −17.71 | 0.36 | 0.92 |
| Q99707 | MTR | 4\|2\|2 | 8 | 2.67 | 5\|6\|4 | 0 | 0 | 0 | 0 | 0 | −18.16 | 0.53 | 0.92 |
| Q15717 | ELAVLI | 8\|9\|9 | 26 | 8.67 | 10\|8\|9 | 0 | 0 | 0 | 0 | 0 | −22.87 | 0.96 | 0.92 |
| P07954-2 | FH | 3\|3\|3 | 9 | 3 | 2\|4\|4 | 0 | 0 | 0 | 0 | 0 | −10.17 | 0.9 | 0.92 |
| O60749-2 | SNX2 | 2\|0\|0 | 2 | 0.67 | 2\|4\|3 | 0 | 0 | 0 | 0 | 0 | −14.75 | 0.22 | 0.92 |
| O43432-4 | EIF4G3 | 4\|5\|4 | 13 | 4.33 | 2\|7\|4 | 0 | 0 | 0 | 0 | 0 | −12.17 | 1 | 0.89 |
| Q07157-2 | TIP1 | 3\|2\|3 | 8 | 2.67 | 0\|3\|3 | 0 | 0 | 0 | 0 | 0 | −6.82 | 1.33 | 0.82 |
| Q96DG6 | CMBL | 0\|2\|0 | 2 | 0.67 | 2\|2\|2 | 0 | 0 | 0 | 0 | 0 | −10.44 | 0.33 | 0.92 |
| P36404-2 | ARL2 | 2\|2\|4 | 8 | 2.67 | 2\|3\|3 | 0 | 0 | 0 | 0 | 0 | −9.29 | 3 | 0.85 |
| Q96FW1 | OTUB1 | 7\|6\|6 | 19 | 6.33 | 6\|8\|8 | 0 | 0 | 0 | 0 | 0 | −19.95 | 0.86 | 0.92 |
| P36578 | RPL4 | 47\|36\|39 | 122 | 40.67 | 39\|40\|44 | 0 | 0 | 0 | 0 | 0 | −95.27 | 0.99 | 0.92 |
| P63173 | RPL38 | 12\|10\|12 | 34 | 11.33 | 13\|10\|9 | 0 | 0 | 0 | 0 | 0 | −25.86 | 1.06 | 0.91 |
| Q8N1G0-2 | ZNF687 | 0\|0\|2 | 2 | 0.67 | 3\|3\|3 | 0 | 0 | 0 | 0 | 0 | −14.75 | 0.22 | 0.92 |
| P30508 | HLA-C | 6\|5\|7 | 18 | 6 | 6\|6\|4 | 0 | 0 | 0 | 0 | 0 | −14.32 | 1.12 | 0.89 |
| Q9Y3Y2-4 | CHTOP | 12\|11\|10 | 33 | 11 | 9\|10\|8 | 0 | 0 | 0 | 0 | 0 | −19.98 | 1.22 | 0.91 |
| Q9BY44 | EIF2A | 13\|10\|12 | 35 | 11.67 | 9\|5\|9 | 0 | 0 | 0 | 0 | 0 | −15.32 | 1.52 | 0.89 |
| P12004 | PCNA | 9\|9\|12 | 30 | 10 | 9\|11\|16 | 0 | 0 | 0 | 0 | 0 | −32.31 | 0.83 | 0.92 |
| Q9BQ67 | GRWD1 | 4\|4\|5 | 13 | 4.33 | 5\|4\|6 | 0 | 0 | 0 | 0 | 0 | −14.57 | 0.87 | 0.92 |
| P07951-3 | PM2 | 2\|0\|3 | 5 | 1.67 | 2\|2\|2 | 0 | 0 | 0 | 0 | 0 | −10.44 | 0.83 | 0.84 |
| P22314-2 | JUBA1 | 4\|5\|3 | 12 | 4 | 4\|4\|3 | 0 | 0 | 0 | 0 | 0 | −11.36 | 1.09 | 0.88 |

The application's sequence listing, which the Patent Office published only in electronic form, follows.

SEQUENCE LISTING (4662 sequences)

SEQ ID NO: 1 - protein, 5207 aa, Homo sapiens
MECPSCQHVSKEETPKFCSQCGERLPPAAPIADSENNNSTMASASEGEMECGQELKEEGGPCLFPGSDSWQENPEEPCSKASWTVQESKKKKRKKKKKGNKSASSELASLPLSPASPCHLTLLSNPWPQDTALPHSQAQQSGPTGQPSQPPGTATTPLEGDGLSAPTEVGDSPLQAQALGEAGVATGSEAQSSPQFQDHTEGEDQDASIPSGGRGLSQEGTGPPTSAGEGHSRTEDAAQELLLPESKGGSSEPGTELQTTEQQAGASASMAVDAVAEPANAVKGAGKEMKEKTQRMKQPPATTPPFKTHCQEAETKTKDEMAAAEEKVGKNEQGEPEDLKKPEGKNRSAAAVKNEKEQKNQEADVQEVKASTLSPGGGVTVFFHAIISLHFPFNPDLHKVFIRGGEEFGESKWDSNICELHYTRDLGHDRVLVEGIVCISKKHLDKYIPYKYVIYNGESFEYEFIYKHQQKKGEYVNRCLFIKSSLLGSGDWHQYYDIVYMKPHGRLQKVMNHITDGPRKDLVKGKQIAAALMLDSTFSILQTWDTINLNSFFTQFEQFCFVLQQPMIYEGQAQLWTDLQYREKEVKRYLWQHLKKHVVPLPDGKSTDFLPVDCPVRSKLKTGLIVLFVVEKIELLLEGSLDWLCHLLTSDASSPDEFHRDLSHILGIPQSWRLYLVNLCQRCMDTRTYTWLGALPVLHCCMELAPRHKDAWRQPEDTWAALEGLSFSPFREQMLDTSSLLQFMREKQHLLSIDEPLFRSWFSLLPLSHLVMYMENFIEHLGRFPAHILDCLSGIYYRLPGLEQVLNTQDVQDVQNVQNILEMLLRLLDTYRDKIPEEALSPSYLTVCLKLHEAICSSTKLLKFYELPALSAEIVCRMIRLLSLVDSAGQRDETGNNSVQTVFQGTLAATKRWLREVFTKNMLTSSGASFTYVKEIEVWRRLVEIQFPAEHGWKESLLGDMEWRLTKEEPLSQITAYCNSCWDTKGLEDSVAKTFEKCIIEAVSSACQSQTSILQGFSYSDLRKFGIVLSAVITKSWPRTADNFDDILKHLLTLADVKHVFRLCGTDEKILANVTEDAKRLIAVADSVLTKVVGDLLSGTILVGQLELIIKHKNQFLDIWQLREKSLSPQDEQCAVEEALDWRREELLLLKKEKRCVDSLLKMCGNVKHLIQVDFGVLAVRHSQDLSSKRLNDTVTVRLSTSSNSQRATHYHLSSQVQEMAGKIDLLRDSHIFQLFWREAAEPLSEPKEDQEAAELLSEPEEESERHILELEEVYDYLYQPSYRKFIKLHQDLKSGEVTLAEIDVIFKDFVNKYTDLDSELKIMCTVDHQDQRDWIKDRVEQIKEYHHLHQAVHAAKVILQVKESLGLNGDFSVLNTLLNFTDNFDDFRRETLDQINQELIQAKKLLQDISEARCKGLQALSLRKEFICWVREALGGINELKVFVDLASISAGENDIDVDRVACFHDAVQGYASLLFKLDPSVDFSAFMKHLKKLWKALDKDQYLPRKLCDSARNLEWLKTVNESHGSVERSSLTLATAINQRGIYVIQAPKGGQKISPDTVLHLILPESPGSHEESREYSLEEVKELLNKLMLMSGKKDRNNTEVERFSEVFCSVQRLSQAFIDLHSAGNMLFRTWIAMAYCSPKQGVSLQMDFGLDLVTELKEGGDVTELLAALCRQMEHFLDSWKRFVTQKRMEHFYLNFYTAEQLVYLSTELRKQPPSDAALTMLSFIKSNCTLRDVLRASVGCGSEAARYRMRRVMEELPLMLLSEFSLVDKLRIIMEQSMRCLPAFLPDCLDLETLGHCLAHLAGMGGSPVERCLPRGLQVGQPNLVVCGHSEVLPAALAVYMQTPSQPLPTYDEVLLCTPATTFEEVALLLRRCLTLGSLGHKVYSLLFADQLSYEVARQAEELFHNLCTQQHREDYQLVMVCDGDWEHCYLPSAFSQHKVFVTPQAPLEAIQAYLAGHYRVPKQTLSAAAVFNDRLCVGIVASERAGVGKSLYVKRLHDKMKMQLNVKNVPLKTIRLIDPQVDESRVLGALLPFLDAQYQKVPVLFHLDVTSSVQTGIWVFLFKLLILQYLMDINGKMWLRNPCHLYIVEILERRTSVPSRSSSALRTRVPQFSFLDIFPKVTCRPPKEVIDMELSALRSDTEPGMDLWEFCSETFQRPYQYLRRFNQNQDLDTFQYQEGSVEGTPEECLQHFLFHCGVINPSWSELRNFARFLNYQLRDCEASLFCNPSFIGDTLRGFKKFVVTFMIFMARDFATPSLHTSDQSPGKHMVTMDGVREEDLAPFSLRKRWESEPHPYVFFNDDHTTMTFIGFHLQPNINGSVDAISHLTGKVIKRDVMTRDLYQGLLLQRVPFNVDFDKLPRHKKLERLCLTLGIPQATDPDKTYELTTDNMLKILAIEMRFRCGIPVIIMGETGCGKTRLIKFLSDLRRGGTNADTIKLVKVHGGTTADMIYSRVREAENVAFANKDQHQLDTILFFDEANTTEAISCIKEVLCDHMVDGQPLAEDSGLHIIAACNPYRKHSEEMICRLESAGLGYRVSMEETADRLGSIPLRQLVYRVHALPPSLIPLVWDFGQLSDVAEKLYIQQIVQRLVESISLDENGTRVITEVLCASQGFMRKTEDECSFVSLRDVERCVKVFRWFHEHSAMLLAQLNAFLSKSSVSKNHTERDPVLWSLMLAIGVCYHASLEKKDSYRKAIARFFPKPYDDSRLLLDEITRAQDLFLDGVPLRKTIAKNLALKENVFMMVVCIELKIPLFLVGKPGSSKSLAKTIVADAMQGPAAYSDLFRSLKQVHLVSFQCSPHSTPQGIISTFRQCARFQQGKDLQQYVSVVVLDEVGLAEDSPKMPLKTLHPLLEDGCIEDDPAPHKKVGFVGISNWALDPAKMNRGIFVSRGSPNETELIESAKGICSSDILVQDRVQGYFASFAKAYETVCKRQDKEFFGLRDYYSLIKMVFAAAKASNRKPSPQDIAQAVLRNFSGKDDIQALDIFLANLPEAKCSEEVSPMQLIKQNIFGPSQKVPGGEQEDAESRYLLVLTKNYVALQILQQTFFEGDQQPEIIFGSGFPKDQEYTQLCRNINRVKICMETGKMVLLLNLQNLYESLYDALNQYYVHLGGQKYVDLGLGTHRVKCRVHPNFRLIVIEEKDVVYKHFPIPLINRLEKHYLDINTVLEKWQKSIVEELCAWVEKFINVKAHHFQKRHKYSPSDVFIGYHSDACASVVLQVIERQGPRALTEELHQKVSEEAKSILLNCATPDAVVRLSAYSLGGFAAEWLSQEYFHRQRHNSFADFLQAHLHTADLERHAIFTEITTFSRLLTSHDCEILESEVTGRAPKPTLLWLQQFDTEYSFLKEVRNCLTNTAKCKILIFQTDFEDGIRSAQLIASAKYSVINEINKIRENEDRIFVYFITKLSRVGRGTAYVGFHGGLWQSVHIDDLRRSTLMVSDVTRLQHVTISQLFAPGDLPELGLEHRAEDGHEEAMETEASTSGEVAEVAEEAMETESSEKVGKETSELGGSDVSILDTTRLLRSCVQSAVGMLRDQNESCTRNMRRVVLLLGLLNEDDACHASFLRVSKMRLSVFLKKQEESQFHPLEWLAREACNQDALQEAGTFRHTLWKRVQGAVTPLLASMISFIDRDGNLELLTRPDTPPWARDLWMFIFSDTMLLNIPLVMNNERHKGEMAYIVVQNHMNLSENASNNVPFSWKIKDYLEELWVQAQYITDAEGLPKKFVDIFQQTPLGRFLAQLHGEPQQELLQCYLKDFILLTMRVSTEEELKFLQMALWSCTRKLKAASEAPEEEVSLPWVHLAYQRFRSRLQNFSRILTIYPQVLHSLMEARWNHELAGCEMTLDAFAAMACTEMLTRNTLKPSPQAWLQLVKNLSMPLELICSDEHMQGSGSLAQAVIREVRAQWSRIFSTALFVEHVLLGTESRVPELQGLVTEHVFLLDKCLRENSDVKTHGPFEAVMRTLCECKETASKTLSRFGIQPCSICLGDAKDPVCLPCDHVHCLRCLRAWFASEQMICPYCLTALPDEFSPAVSQAHREAIEKHARFRQMCNSFFVDLVSTICFKDNAPPEKEVIESLLSLLFVQKGRLRDAAQRHCEHTKSLSPFNDVVDKTPVIRSVILKLLLKYSFHDVKDYIQEYLTLLKKKAFITEDKTELYMLFINCLEDSILEKTSAYSRNDELNHLEEEGRFLKAYSPASRGREPANEASVEYLQEVARIRLCLDRAADFLSEPEGGPEMAKEKQCYLQQVKQFCIRVENDWHRVYLVRKLSSQRGMEFVQGLSKPGRPHQWVFPKDVVKQQGLRQDHPGQMDRYLVYGDEYKALRDAVAKAVLECKPLGIKTALKACKTPQSQQSAYFLLTLFREVAILYRSHNASLHPTPEQCEAVSKFIGECKILSPPDISRFATSLVDNSVPLLRAGPSDSNLDGTVTEMAIHAAAVLLCGQNELLEPLKNLAFSPATMAHAFLPTMPEDLLAQARRWKGLERVHWYTCPNGHPCSVGECGRPMEQSICIDCHAPIGGIDHKPRDGFHLVKDKADRTQTGHVLGNPQRRDVVTCDRGLPPVVFLLIRLLTHLALLLGASQSSQALINIIKPPVRDPKGFLQQHILKDLEQLAKMLGHSADETIGVVHLVLRRLLQEQHQLSSRRLLNFDTELSTKEMRNNWEKEIAAVISPELEHLDKTLPTMNNLISQDKRISSNPVAKIIYGDPVTFLPHLPRKSVVHCSKIWSCRKRITVEYLQHIVEQKNGKERVPILWHFLQKEAELRLVKFLPEILALQRDLVKQFQNVQQVEYSSIRGFLSKHSSDGLRQLLHNRITVFLSTWNKLRRSLETNGEINLPKDYCSTDLDLDTEFEILLPRRRGLGLCATALVSYLIRLHNEIVYAVEKLSKENNSYSVDAAEVTELHVISYEVERDLTPLILSNCQYQVEEGRETVQEFDLEKIQRQIVSRFLQGKPRLSLKGIPTLVYRHDWNYEHLFMDIKNKMAQDSLPSSVISAISGQLQSYSDACEVLSVVEVTLGFLSTAGGDPNMQLNVYTQDILQMGDQTIHVLKALNRCQLKHTIALWQFLSAHKSEQLLRLHKEPFGEISSRYKADLSPENAKLLSTFLNQTGLDAFLLELHEMIILKLKNPQTQTEERFRPQWSLRDTLVSYMQTKESEILPEMASQFPEEILLASCVSVWKTAAVLKWNREMR

SEQ ID NO: 2 - protein, 855 aa, Homo sapiens
EYVNRCLFIKSSLLGSGDWHQYYDIVYMKPHGRLQKVMNHITDGPRKDLVKGKQIAAALMLDSTFSILQTWDTINLNSFFTQFEQFCFVLQQPMIYEGQAQLWTDLQYREKEVKRYLWQHLKKHVVPLPDGKSTDFLPVDCPVRSKLKTGLIVLFVVEKIELLLEGSLDWLCHLLTSDASSPDEFHRDLSHILGIPQSWRLYLVNLCQRCMDTRTYTWLGALPVLHCCMELAPRHKDAWRQPEDTWAALEGLSFSPFREQMLDTSSLLQFMREKQHLLSIDEPLFRSWFSLLPLSHLVMYMENFIEHLGRFPAHILDCLSGIYYRLPGLEQVLNTQDVQDVQNVQNILEMLLRLLDTYRDKIPEEALSPSYLTVCLKLHEAICSSTKLLKFYELPALSAEIVCRMIRLLSLVDSAGQRDETGNNSVQTVFQGTLAATKRWLREVFTKNMLTSSGASFTYVKEIEVWRRLVEIQFPAEHGWKESLLGDMEWRLTKEEPLSQITAYCNSCWDTKGLEDSVAKTFEKCIIEAVSSACQSQTSILQGFSYSDLRKFGIVLSAVITKSWPRTADNFDDILKHLLTLADVKHVFRLCGTDEKILANVTEDAKRLIAVADSVLTKVVGDLLSGTILVGQLELIIKHKNQFLDIWQLREKSLSPQDEQCAVEEALDWRREELLLLKKEKRCVDSLLKMCGNVKHLIQVDFGVLAVRHSQDLSSKRLNDTVTVRLSTSSNSQRATHYHLSSQVQEMAGKIDLLRDSHIFQLFWREAAEPLSEPKEDQEAAELLSEPEEESERHILELEEVYDYLYQPSYRKFIKLHQDLKSGEVTLAEIDVIFKDFVNKYTDLDSELKIMCTVD

SEQ ID NO: 3 - protein, 467 aa, Homo sapiens
HQDQRDWIKDRVEQIKEYHHLHQAVHAAKVILQVKESLGLNGDFSVLNTLLNFTDNFDDFRRETLDQINQELIQAKKLLQDISEARCKGLQALSLRKEFICWVREALGGINELKVFVDLASISAGENDIDVDRVACFHDAVQGYASLLFKLDPSVDFSAFMKHLKKLWKALDKDQYLPRKLCDSARNLEWLKTVNESHGSVERSSLTLATAINQRGIYVIQAPKGGQKISPDTVLHLILPESPGSHEESREYSLEEVKELLNKLMLMSGKKDRNNTEVERFSEVFCSVQRLSQAFIDLHSAGNMLFRTWIAMAYCSPKQGVSLQMDFGLDLVTELKEGGDVTELLAALCRQMEHFLDSWKRFVTQKRMEHFYLNFYTAEQLVYLSTELRKQPPSDAALTMLSFIKSNCTLRDVLRASVGCGSEAARYRMRRVMEELPLMLLSEFSLVDKLRIIMEQSMRCLPAFLPD

SEQ ID NO: 4 - protein, 1652 aa, Homo sapiens
CLDLETLGHCLAHLAGMGGSPVERCLPRGLQVGQPNLVVCGHSEVLPAALAVYMQTPSQPLPTYDEVLLCTPATTFEEVALLLRRCLTLGSLGHKVYSLLFADQLSYEVARQAEELFHNLCTQQHREDYQLVMVCDGDWEHCYLPSAFSQHKVFVTPQAPLEAIQAYLAGHYRVPKQTLSAAAVFNDRLCVGIVASERAGVGKSLYVKRLHDKMKMQLNVKNVPLKTIRLIDPQVDESRVLGALLPFLDAQYQKVPVLFHLDVTSSVQTGIWVFLFKLLILQYLMDINGKMWLRNPCHLYIVEILERRTSVPSRSSSALRTRVPQFSFLDIFPKVTCRPPKEVIDMELSALRSDTEPGMDLWEFCSETFQRPYQYLRRFNQNQDLDTFQYQEGSVEGTPEECLQHFLFHCGVINPSWSELRNFARFLNYQLRDCEASLFCNPSFIGDTLRGFKKFVVTFMIFMARDFATPSLHTSDQSPGKHMVTMDGVREEDLAPFSLRKRWESEPHPYVFFNDDHTTMTFIGFHLQPNINGSVDAISHLTGKVIKRDVMTRDLYQGLLLQRVPFNVDFDKLPRHKKLERLCLTLGIPQATDPDKTYELTTDNMLKILAIEMRFRCGIPVIIMGETGCGKTRLIKFLSDLRRGGTNADTIKLVKVHGGTTADMIYSRVREAENVAFANKDQHQLDTILFFDEANTTEAISCIKEVLCDHMVDGQPLAEDSGLHIIAACNPYRKHSEEMICRLESAGLGYRVSMEETADRLGSIPLRQLVYRVHALPPSLIPLVWDFGQLSDVAEKLYIQQIVQRLVESISLDENGTRVITEVLCASQGFMRKTEDECSFVSLRDVERCVKVFRWFHEHSAMLLAQLNAFLSKSSVSKNHTERDPVLWSLMLAIGVCYHASLEKKDSYRKAIARFFPKPYDDSRLLLDEITRAQDLFLDGVPLRKTIAKNLALKENVFMMVVCIELKIPLFLVGKPGSSKSLAKTIVADAMQGPAAYSDLFRSLKQVHLVSFQCSPHSTPQGIISTFRQCARFQQGKDLQQYVSVVVLDEVGLAEDSPKMPLKTLHPLLEDGCIEDDPAPHKKVGFVGISNWALDPAKMNRGIFVSRGSPNETELIESAKGICSSDILVQDRVQGYFASFAKAYETVCKRQDKEFFGLRDYYSLIKMVFAAAKASNRKPSPQDIAQAVLRNFSGKDDIQALDIFLANLPEAKCSEEVSPMQLIKQNIFGPSQKVPGGEQEDAESRYLLVLTKNYVALQILQQTFFEGDQQPEIIFGSGFPKDQEYTQLCRNINRVKICMETGKMVLLLNLQNLYESLYDALNQYYVHLGGQKYVDLGLGTHRVKCRVHPNFRLIVIEEKDVVYKHFPIPLINRLEKHYLDINTVLEKWQKSIVEELCAWVEKFINVKAHHFQKRHKYSPSDVFIGYHSDACASVVLQVIERQGPRALTEELHQKVSEEAKSILLNCATPDAVVRLSAYSLGGFAAEWLSQEYFHRQRHNSFADFLQAHLHTADLERHAIFTEITTFSRLLTSHDCEILESEVTGRAPKPTLLWLQQFDTEYSFLKEVRNCLTNTAKCKILIFQTDFEDGIRSAQLIASAKYSVINEINKIRENEDRIFVYFITKLSRVGRGTAYVGFHGGLWQSVHIDDLRR

SEQ ID NO: 5 - protein, 172 aa, Homo sapiens
CLDLETLGHCLAHLAGMGGSPVERCLPRGLQVGQPNLVVCGHSEVLPAALAVYMQTPSQPLPTYDEVLLCTPATTFEEVALLLRRCLTLGSLGHKVYSLLFADQLSYEVARQAEELFHNLCTQQHREDYQLVMVCDGDWEHCYLPSAFSQHKVFVTPQAPLEAIQAYLAGHY

SEQ ID NO: 6 - protein, 300 aa, Homo sapiens
RVPKQTLSAAAVFNDRLCVGIVASERAGVGKSLYVKRLHDKMKMQLNVKNVPLKTIRLIDPQVDESRVLGALLPFLDAQYQKVPVLFHLDVTSSVQTGIWVFLFKLLILQYLMDINGKMWLRNPCHLYIVEILERRTSVPSRSSSALRTRVPQFSFLDIFPKVTCRPPKEVIDMELSALRSDTEPGMDLWEFCSETFQRPYQYLRRFNQNQDLDTFQYQEGSVEGTPEECLQHFLFHCGVINPSWSELRNFARFLNYQLRDCEASLFCNPSFIGDTLRGFKKFVVTFMIFMARDFATPSL

SEQ ID NO: 7 - protein, 349 aa, Homo sapiens
TTDNMLKILAIEMRFRCGIPVIIMGETGCGKTRLIKFLSDLRRGGTNADTIKLVKVHGGTTADMIYSRVREAENVAFANKDQHQLDTILFFDEANTTEAISCIKEVLCDHMVDGQPLAEDSGLHIIAACNPYRKHSEEMICRLESAGLGYRVSMEETADRLGSIPLRQLVYRVHALPPSLIPLVWDFGQLSDVAEKLYIQQIVQRLVESISLDENGTRVITEVLCASQGFMRKTEDECSFVSLRDVERCVKVFRWFHEHSAMLLAQLNAFLSKSSVSKNHTERDPVLWSLMLAIGVCYHASLEKKDSYRKAIARFFPKPYDDSRLLLDEITRAQDLFLDGVPLRKTIAK

SEQ ID NO: 8 - protein, 267 aa, Homo sapiens
NLALKENVFMMVVCIELKIPLFLVGKPGSSKSLAKTIVADAMQGPAAYSDLFRSLKQVHLVSFQCSPHSTPQGIISTFRQCARFQQGKDLQQYVSVVVLDEVGLAEDSPKMPLKTLHPLLEDGCIEDDPAPHKKVGFVGISNWALDPAKMNRGIFVSRGSPNETELIESAKGICSSDILVQDRVQGYFASFAKAYETVCKRQDKEFFGLRDYYSLIKMVFAAAKASNRKPSPQDIAQAVLRNFSGKDDIQALDIFLANLPEAKCSEE

SEQ ID NO: 9 - protein, 281 aa, Homo sapiens
VSPMQLIKQNIFGPSQKVPGGEQEDAESRYLLVLTKNYVALQILQQTFFEGDQQPEIIFGSGFPKDQEYTQLCRNINRVKICMETGKMVLLLNLQNLYESLYDALNQYYVHLGGQKYVDLGLGTHRVKCRVHPNFRLIVIEEKDVVYKHFPIPLINRLEKHYLDINTVLEKWQKSIVEELCAWVEKFINVKAHHFQKRHKYSPSDVFIGYHSDACASVVLQVIERQGPRALTEELHQKVSEEAKSILLNCATPDAVVRLSAYSLGGFAAEWLSQEYFHRQR

SEQ ID NO: 10 - protein, 155 aa, Homo sapiens
HNSFADFLQAHLHTADLERHAIFTEITTFSRLLTSHDCEILESEVTGRAPKPTLLWLQQFDTEYSFLKEVRNCLTNTAKCKILIFQTDFEDGIRSAQLIASAKYSVINEINKIRENEDRIFVYFITKLSRVGRGTAYVGFHGGLWQSVHIDDLRR

SEQ ID NO: 11 - protein, 196 aa, Homo sapiens
STLMVSDVTRLQHVTISQLFAPGDLPELGLEHRAEDGHEEAMETEASTSGEVAEVAEEAMETESSEKVGKETSELGGSDVSILDTTRLLRSCVQSAVGMLRDQNESCTRNMRRVVLLLGLLNEDDACHASFLRVSKMRLSVFLKKQEESQFHPLEWLAREACNQDALQEAGTFRHTLWKRVQGAVTPLLASMISFI

SEQ ID NO: 12 - protein, 1341 aa, Homo sapiens
DRDGNLELLTRPDTPPWARDLWMFIFSDTMLLNIPLVMNNERHKGEMAYIVVQNHMNLSENASNNVPFSWKIKDYLEELWVQAQYITDAEGLPKKFVDIFQQTPLGRFLAQLHGEPQQELLQCYLKDFILLTMRVSTEEELKFLQMALWSCTRKLKAASEAPEEEVSLPWVHLAYQRFRSRLQNFSRILTIYPQVLHSLMEARWNHELAGCEMTLDAFAAMACTEMLTRNTLKPSPQAWLQLVKNLSMPLELICSDEHMQGSGSLAQAVIREVRAQWSRIFSTALFVEHVLLGTESRVPELQGLVTEHVFLLDKCLRENSDVKTHGPFEAVMRTLCECKETASKTLSRFGIQPCSICLGDAKDPVCLPCDHVHCLRCLRAWFASEQMICPYCLTALPDEFSPAVSQAHREAIEKHARFRQMCNSFFVDLVSTICFKDNAPPEKEVIESLLSLLFVQKGRLRDAAQRHCEHTKSLSPFNDVVDKTPVIRSVILKLLLKYSFHDVKDYIQEYLTLLKKKAFITEDKTELYMLFINCLEDSILEKTSAYSRNDELNHLEEEGRFLKAYSPASRGREPANEASVEYLQEVARIRLCLDRAADFLSEPEGGPEMAKEKQCYLQQVKQFCIRVENDWHRVYLVRKLSSQRGMEFVQGLSKPGRPHQWVFPKDVVKQQGLRQDHPGQMDRYLVYGDEYKALRDAVAKAVLECKPLGIKTALKACKTPQSQQSAYFLLTLFREVAILYRSHNASLHPTPEQCEAVSKFIGECKILSPPDISRFATSLVDNSVPLLRAGPSDSNLDGTVTEMAIHAAAVLLCGQNELLEPLKNLAFSPATMAHAFLPTMPEDLLAQARRWKGLERVHWYTCPNGHPCSVGECGRPMEQSICIDCHAPIGGIDHKPRDGFHLVKDKADRTQTGHVLGNPQRRDVVTCDRGLPPVVFLLIRLLTHLALLLGASQSSQALINIIKPPVRDPKGFLQQHILKDLEQLAKMLGHSADETIGVVHLVLRRLLQEQHQLSSRRLLNFDTELSTKEMRNNWEKEIAAVISPELEHLDKTLPTMNNLISQDKRISSNPVAKIIYGDPVTFLPHLPRKSVVHCSKIWSCRKRITVEYLQHIVEQKNGKERVPILWHFLQKEAELRLVKFLPEILALQRDLVKQFQNVQQVEYSSIRGFLSKHSSDGLRQLLHNRITVFLSTWNKLRRSLETNGEINLPKDYCSTDLDLDTEFEILLPRRRGLGLCATALVSYLIRLHNEIVYAVEKLSKENNSYSVDAAEVTELHVISYEVERDLTPLILSNCQYQVEEGRETVQEFDLEKIQRQIVSRFLQGKPRLSLKGIPTLVYRHD

SEQ ID NO: 13 - protein, 346 aa, Homo sapiens
DRDGNLELLTRPDTPPWARDLWMFIFSDTMLLNIPLVMNNERHKGEMAYIVVQNHMNLSENASNNVPFSWKIKDYLEELWVQAQYITDAEGLPKKFVDIFQQTPLGRFLAQLHGEPQQELLQCYLKDFILLTMRVSTEEELKFLQMALWSCTRKLKAASEAPEEEVSLPWVHLAYQRFRSRLQNFSRILTIYPQVLHSLMEARWNHELAGCEMTLDAFAAMACTEMLTRNTLKPSPQAWLQLVKNLSMPLELICSDEHMQGSGSLAQAVIREVRAQWSRIFSTALFVEHVLLGTESRVPELQGLVTEHVFLLDKCLRENSDVKTHGPFEAVMRTLCECKETASKTL

SEQ ID NO: 14 - protein, 61 aa, Homo sapiens
SRFGIQPCSICLGDAKDPVCLPCDHVHCLRCLRAWFASEQMICPYCLTALPDEFSPAVSQA

SEQ ID NO: 15 - protein, 696 aa, Homo sapiens
HREAIEKHARFRQMCNSFFVDLVSTICFKDNAPPEKEVIESLLSLLFVQKGRLRDAAQRHCEHTKSLSPFNDVVDKTPVIRSVILKLLLKYSFHDVKDYIQEYLTLLKKKAFITEDKTELYMLFINCLEDSILEKTSAYSRNDELNHLEEEGRFLKAYSPASRGREPANEASVEYLQEVARIRLCLDRAADFLSEPEGGPEMAKEKQCYLQQVKQFCIRVENDWHRVYLVRKLSSQRGMEFVQGLSKPGRPHQWVFPKDVVKQQGLRQDHPGQMDRYLVYGDEYKALRDAVAKAVLECKPLGIKTALKACKTPQSQQSAYFLLTLFREVAILYRSHNASLHPTPEQCEAVSKFIGECKILSPPDISRFATSLVDNSVPLLRAGPSDSNLDGTVTEMAIHAAAVLLCGQNELLEPLKNLAFSPATMAHAFLPTMPEDLLAQARRWKGLERVHWYTCPNGHPCSVGECGRPMEQSICIDCHAPIGGIDHKPRDGFHLVKDKADRTQTGHVLGNPQRRDVVTCDRGLPPVVFLLIRLLTHLALLLGASQSSQALINIIKPPVRDPKGFLQQHILKDLEQLAKMLGHSADETIGVVHLVLRRLLQEQHQLSSRRLLNFDTELSTKEMRNNWEKEIAAVISPELEHLDKTLPTMNNLISQDKRISSNPVAKIIYGDPVTFLPHLPRKSVVHCSKIWSCRKR

SEQ ID NO: 16 - protein, 238 aa, Homo sapiens
ITVEYLQHIVEQKNGKERVPILWHFLQKEAELRLVKFLPEILALQRDLVKQFQNVQQVEYSSIRGFLSKHSSDGLRQLLHNRITVFLSTWNKLRRSLETNGEINLPKDYCSTDLDLDTEFEILLPRRRGLGLCATALVSYLIRLHNEIVYAVEKLSKENNSYSVDAAEVTELHVISYEVERDLTPLILSNCQYQVEEGRETVQEFDLEKIQRQIVSRFLQGKPRLSLKGIPTLVYRHD

SEQ ID NO: 17 - protein, 223 aa, Homo sapiens
WNYEHLFMDIKNKMAQDSLPSSVISAISGQLQSYSDACEVLSVVEVTLGFLSTAGGDPNMQLNVYTQDILQMGDQTIHVLKALNRCQLKHTIALWQFLSAHKSEQLLRLHKEPFGEISSRYKADLSPENAKLLSTFLNQTGLDAFLLELHEMIILKLKNPQTQTEERFRPQWSLRDTLVSYMQTKESEILPEMASQFPEEILLASCVSVWKTAAVLKWNREMR

SEQ ID NO: 18 - protein, 48 aa, Homo sapiens
  SITE 38: note = Phosphorylated residue
REAAEPLSEPKEDQEAAELLSEPEEESERHILELEEVYDYLYQPSYRK

SEQ ID NO: 19 - protein, 33 aa, Homo sapiens
  SITE 4: note = Phosphorylated residue
KDNTVPLKLIALLANGEFHSGEQLGETLGMSRA

SEQ ID NO: 20 - protein, 37 aa, Homo sapiens
  SITE 12: note = Phosphorylated residue
  SITE 31: note = Phosphorylated residue
RVQGAVTPLLASMISFIDRDGNLELLTRPDTPPWARD

SEQ ID NO: 21 - protein, 71 aa, Homo sapiens
  SITE 8: note = Phosphorylated residue
  SITE 33: note = Phosphorylated residue
RGLSQEGTGPPTSAGEGHSRTEDAAQELLLPESKGGSSEPGTELQTTEQQAGASASMAVDAVAEPANAVKG

SEQ ID NO: 22 - protein, 56 aa, Homo sapiens
  SITE 17: note = Phosphorylated residue
RAEDGHEEAMETEASTSGEVAEVAEEAMETESSEKVGKETSELGGSDVSILDTTRL

SEQ ID NO: 23 - protein, 56 aa, Homo sapiens; identical to SEQ ID NO: 22
  SITE 17: note = Phosphorylated residue

SEQ ID NO: 24 - protein, 60 aa, Homo sapiens
  SITE 44: note = Phosphorylated residue
RVQGAVTPLLASMISFIDRDGNLELLTRPDTPPWARDLWMFIFSDTMLLNIPLVMNNERH

SEQ ID NO: 25 - protein, 48 aa, Homo sapiens; identical to SEQ ID NO: 18
  SITE 27: note = Phosphorylated residue

SEQ ID NO: 26 - protein, 48 aa, Homo sapiens; identical to SEQ ID NO: 18
  SITE 21: note = Phosphorylated residue

SEQ ID NO: 27 - protein, 31 aa, Homo sapiens
  SITE 22: note = Phosphorylated residue
KEIAAVISPELEHLDKTLPTMNNLISQDKRI

SEQ ID NO: 28 - protein, 33 aa, Homo sapiens
  SITE 20: note = Phosphorylated residue
RVEESVVNQGWITLQEAGINLDRNTLAATLIRE

SEQ ID NO: 29 - protein, 14 aa, Homo sapiens
  SITE 6: note = Phosphorylated residue
RVKWPNDLYLQDRK

SEQ ID NO: 30 - protein, 26 aa, Homo sapiens
  SITE 8: note = Phosphorylated residue
KLIALLANGEFHSGEQLGETLGMSRA

SEQ ID NO: 31 - protein, 26 aa, Homo sapiens
  SITE 8: note = Phosphorylated residue
KLIALLANGEFHSGEQLGETLGMSRA

SEQ ID NO: 32 - protein, 14 aa, Homo sapiens
  SITE 5: note = Phosphorylated residue
RRLLNFDTELSTKE

SEQ ID NO: 33 - protein, 20 aa, Homo sapiens
  SITE 7: note = Phosphorylated residue
RGREPANEASVEYLQEVARI

SEQ ID NO: 34 - protein, 44 aa, Homo sapiens
  SITE 13: note = Phosphorylated residue
RWESEPHPYVFFNDDHTTMTFIGFHLQPNINGSVDAISHLTGKV

SEQ ID NO: 35 - protein, 17 aa, Homo sapiens
  SITE 6: note = Phosphorylated residue
RNDELNHLEEEGRFLKA

SEQ ID NO: 36 - protein, 16 aa, Homo sapiens
  SITE 9: note = Phosphorylated residue
RFATSLVDNSVPLLRA

SEQ ID NO: 37 - protein, 23 aa, Homo sapiens
  SITE 12: note = Phosphorylated residue
KTSAYSRNDELNHLEEEGRFLKA

SEQ ID NO: 38 - protein, 16 aa, Homo sapiens
  SITE 9: note = Phosphorylated residue
RFATSLVDNSVPLLRA

SEQ ID NO: 39 - protein, 23 aa, Homo sapiens
  SITE 12: note = Phosphorylated residue
KTSAYSRNDELNHLEEEGRFLKA

SEQ ID NO: 40 - protein, 34 aa, Homo sapiens
  SITE 31: note = Phosphorylated residue
KHIQTLRDWGVDVFTVPGKGYSLPEPIPLLNAKQ

SEQ ID NO: 41 - protein, 13 aa, Homo sapiens
  SITE 4: note = Phosphorylated residue
RLLNFDTELSTKE

SEQ ID NO: 42 - protein, 16 aa, Homo sapiens
  SITE 9: note = Phosphorylated residue
RFATSLVDNSVPLLRA

SEQ ID NO: 43 - protein, 16 aa, Homo sapiens
  SITE 9: note = Phosphorylated residue
RFATSLVDNSVPLLRA

SEQ ID NO: 44 - protein, 16 aa, Homo sapiens
  SITE 9: note = Phosphorylated residue
RFATSLVDNSVPLLRA

SEQ ID NO: 45 - protein, 17 aa, Homo sapiens
  SITE 6: note = Phosphorylated residue
RNDELNHLEEEGRFLKA

SEQ ID NO: 46 - protein, 14 aa, Homo sapiens
  SITE 6: note = Phosphorylated residue
RNDELNHLEEEGRF

SEQ ID NO: 47 - protein, 14 aa, Homo sapiens
  SITE 5: note = Phosphorylated residue
RGGTNADTIKLVKV

SEQ ID NO: 48 - protein, 14 aa, Homo sapiens
  SITE 6: note = Phosphorylated residue
RSLETNGEINLPKD

SEQ ID NO: 49 - protein, 29 aa, Homo sapiens
  SITE 22: note = Phosphorylated residue
KQILGQLDGGSVAVLPVVDSTNQYLLDRI

SEQ ID NO: 50 - protein, 24 aa, Homo sapiens
  SITE 2: note = Phosphorylated residue
RNFSGKDDIQALDIFLANLPEAKC

SEQ ID NO: 51 - protein, 22 aa, Homo sapiens
  SITE 2: note = Phosphorylated residue
RNNWEKEIAAVISPELEHLDKT

SEQ ID NO: 52 - protein, 20 aa, Homo sapiens
  SITE 15: note = Phosphorylated residue
RITVEYLQHIVEQKNGKERV

SEQ ID NO: 53 - protein, 44 aa, Homo sapiens; identical to SEQ ID NO: 34
  SITE 31: note = Phosphorylated residue

SEQ ID NO: 54 - protein, 20 aa, Homo sapiens
  SITE 15: note = Phosphorylated residue
RITVEYLQHIVEQKNGKERV

SEQ ID NO: 55 - protein, 14 aa, Homo sapiens
  SITE 6: note = Phosphorylated residue
RNDELNHLEEEGRF

SEQ ID NO: 56 - protein, 17 aa, Homo sapiens
  SITE 9: note = Phosphorylated residue
KVGFVGISNWALDPAKM

SEQ ID NO: 57 - protein, 42 aa, Homo sapiens
  SITE 34: note = Phosphorylated residue
KGGSSEPGTELQTTEQQAGASASMAVDAVAEPANAVKGAGKE

SEQ ID NO: 58 - protein, 29 aa, Homo sapiens
  SITE 22: note = Phosphorylated residue
KQILGQLDGGSVAVLPVVDSTNQYLLDRI

SEQ ID NO: 59 - protein, 16 aa, Homo sapiens
  SITE 13: note = Phosphorylated residue
KGYSLPEPIPLLNAKQ

SEQ ID NO: 60 - protein, 17 aa, Homo sapiens
  SITE 6: note = Phosphorylated residue
RNDELNHLEEEGRFLKA

SEQ ID NO: 61 - protein, 22 aa, Homo sapiens
  SITE 2: note = Phosphorylated residue
RNNWEKEIAAVISPELEHLDKT

SEQ ID NO: 62 - protein, 17 aa, Homo sapiens
  SITE 2: note = Phosphorylated residue
RNDELNHLEEEGRFLKA

SEQ ID NO: 63 - protein, 24 aa, Homo sapiens
  SITE 2: note = Phosphorylated residue
RNFSGKDDIQALDIFLANLPEAKC

SEQ ID NO: 64 - protein, 26 aa, Homo sapiens
  SITE 8: note = Phosphorylated residue
KLIALLANGEFHSGEQLGETLGMSRA

SEQ ID NO: 65 - protein, 29 aa, Homo sapiens
  SITE 22: note = Phosphorylated residue
KQILGQLDGGSVAVLPVVDSTNQYLLDRI

SEQ ID NO: 66 - protein, 44 aa, Homo sapiens; identical to SEQ ID NO: 34
  SITE 31: note = Phosphorylated residue

SEQ ID NO: 67 - protein, 34 aa, Homo sapiens
  SITE 22: note = Phosphorylated residue
KQILGQLDGGSVAVLPVVDSTNQYLLDRIGELKS

SEQ ID NO: 68 - protein, 17 aa, Homo sapiens
  SITE 2: note = Phosphorylated residue
RNDELNHLEEEGRFLKA

SEQ ID NO: 69 - protein, 28 aa, Homo sapiens
  SITE 25: note = Phosphorylated residue
RDWGVDVFTVPGKGYSLPEPIPLLNAKQ

SEQ ID NO: 70 - protein, 34 aa, Homo sapiens; identical to SEQ ID NO: 67
  SITE 22: note = Phosphorylated residue

SEQ ID NO: 71 - protein, 42 aa, Homo sapiens; identical to SEQ ID NO: 57
  SITE 34: note = Phosphorylated residue

SEQ ID NO: 72 - protein, 34 aa, Homo sapiens; identical to SEQ ID NO: 67
  SITE 22: note = Phosphorylated residue

SEQ ID NO: 73 - protein, 20 aa, Homo sapiens
  SITE 17: note = Phosphorylated residue
KDVVKQQGLRQDHPGQMDRY

SEQ ID NO: 74 - protein, 14 aa, Homo sapiens
  SITE 2: note = Phosphorylated residue
RMKQPPATTPPFKT

SEQ ID NO: 75 - protein, 20 aa, Homo sapiens
  SITE 16: note = Phosphorylated residue
RFRPQWSLRDTLVSYMQTKE

SEQ ID NO: 76 - protein, 25 aa, Homo sapiens
  SITE 13: note = Phosphorylated residue
KQQGLRQDHPGQMDRYLVYGDEYKA

SEQ ID NO: 77 - protein, 31 aa, Homo sapiens; identical to SEQ ID NO: 27
  SITE 21: note = Phosphorylated residue

SEQ ID NO: 78 - protein, 25 aa, Homo sapiens
  SITE 13: note = Phosphorylated residue
KQQGLRQDHPGQMDRYLVYGDEYKA

SEQ ID NO: 79 - protein, 12 aa, Homo sapiens
  SITE 8: note = Phosphorylated residue
RDTLVSYMQTKE

SEQ ID NO: 80 - protein, 15 aa, Homo sapiens
  SITE 10: note = Phosphorylated residue
KVHGGTTADMIYSRV

SEQ ID NO: 81 - protein, 20 aa, Homo sapiens
  SITE 17: note = Phosphorylated residue
KDVVKQQGLRQDHPGQMDRY

SEQ ID NO: 82 - protein, 12 aa, Homo sapiens
  SITE 8: note = Phosphorylated residue
RDTLVSYMQTKE

SEQ ID NO: 83 - protein, 15 aa, Homo sapiens
  SITE 11: note = Phosphorylated residue
RHDWNYEHLFMDIKN

SEQ ID NO: 84 - protein, 17 aa, Homo sapiens
  SITE 3: note = Phosphorylated residue
KVMNHITDGPRKDLVKG

SEQ ID NO: 85 - protein, 14 aa, Homo sapiens
  SITE 2: note = Phosphorylated residue
RMKQPPATTPPFKT

SEQ ID NO: 86 - protein, 18 aa, Homo sapiens
  SITE 4: note = Phosphorylated residue
RVSMEETADRLGSIPLRQ

SEQ ID NO: 87 - protein, 20 aa, Homo sapiens
  SITE 17: note = Phosphorylated residue
KDVVKQQGLRQDHPGQMDRY

SEQ ID NO: 88 - protein, 59 aa, Homo sapiens
  SITE 33: note = Phosphorylated residue
RLQHVTISQLFAPGDLPELGLEHRAEDGHEEAMETEASTSGEVAEVAEEAMETESSEKV

SEQ ID NO: 89 - protein, 17 aa, Homo sapiens
  SITE 3: note = Phosphorylated residue
KVMNHITDGPRKDLVKG

SEQ ID NO: 90 - protein, 25 aa, Homo sapiens
  SITE 13: note = Phosphorylated residue
KQQGLRQDHPGQMDRYLVYGDEYKA

SEQ ID NO: 91 - protein, 23 aa, Homo sapiens
  SITE 3: note = Phosphorylated residue
RGMEFVQGLSKPGRPHQWVFPKD

SEQ ID NO: 92 - protein, 18 aa, Homo sapiens
  SITE 14: note = Phosphorylated residue
RATHYHLSSQVQEMAGKI

SEQ ID NO: 93 - protein, 23 aa, Homo sapiens
  SITE 3: note = Phosphorylated residue
RGMEFVQGLSKPGRPHQWVFPKD

SEQ ID NO: 94 - protein, 18 aa, Homo sapiens
  SITE 14: note = Phosphorylated residue
RATHYHLSSQVQEMAGKI

SEQ ID NO: 95 - protein, 21 aa, Homo sapiens
  SITE 18: note = Phosphorylated residue
KKVGFVGISNWALDPAKMNRG

SEQ ID NO: 96 - protein, 18 aa, Homo sapiens
  SITE 16: note = Phosphorylated residue
RENSDVKTHGPFEAVMRT

SEQ ID NO: 97 - protein, 59 aa, Homo sapiens; identical to SEQ ID NO: 88
  SITE 33: note = Phosphorylated residue

SEQ ID NO: 98 - protein, 14 aa, Homo sapiens
  SITE 2: note = Phosphorylated residue
RMKQPPATTPPFKT

SEQ ID NO: 99 - protein, 21 aa, Homo sapiens
  SITE 3: note = Phosphorylated residue
KHMVTMDGVREEDLAPFSLRK

SEQ ID NO: 100 - protein, 10 aa, Homo sapiens
  SITE 4: note = Phosphorylated residue
RIIMEQSMRC

SEQ ID NO: 101 - protein, 18 aa, Homo sapiens
  SITE 16: note = Phosphorylated residue
RENSDVKTHGPFEAVMRT

SEQ ID NO: 102 - protein, 14 aa, Homo sapiens
  SITE 2: note = Phosphorylated residue
RMKQPPATTPPFKT

SEQ ID NO: 103 - protein, 21 aa, Homo sapiens
  SITE 6: note = Phosphorylated residue
KHMVTMDGVREEDLAPFSLRK

SEQ ID NO: 104 - protein, 12 aa, Homo sapiens
  SITE 5: note = Phosphorylated residue
RSTLMVSDVTRL

SEQ ID NO: 105 - protein, 16 aa, Homo sapiens
  SITE 14: note = Phosphorylated residue
RLLNFDTELSTKEMRN

SEQ ID NO: 106 - protein, 17 aa, Homo sapiens
  SITE 3: note = Phosphorylated residue
KVMNHITDGPRKDLVKG

SEQ ID NO: 107 - protein, 23 aa, Homo sapiens
  SITE 3: note = Phosphorylated residue
RGMEFVQGLSKPGRPHQWVFPKD

SEQ ID NO: 108 - protein, 15 aa, Homo sapiens
  SITE 11: note = Phosphorylated residue
RHDWNYEHLFMDIKN

SEQ ID NO: 109 - protein, 31 aa, Homo sapiens; identical to SEQ ID NO: 27
  SITE 21: note = Phosphorylated residue

SEQ ID NO: 110 - protein, 18 aa, Homo sapiens
  SITE 14: note = Phosphorylated residue
RATHYHLSSQVQEMAGKI

SEQ ID NO: 111 - protein, 17 aa, Homo sapiens
  SITE 3: note = Phosphorylated residue
KVMNHITDGPRKDLVKG

SEQ ID NO: 112 - protein, 25 aa, Homo sapiens
  SITE 13: note = Phosphorylated residue
KQQGLRQDHPGQMDRYLVYGDEYKA

SEQ ID NO: 113 - protein, 18 aa, Homo sapiens
  SITE 14: note = Phosphorylated residue
RATHYHLSSQVQEMAGKI

SEQ ID NO: 114 - protein, 28 aa, Homo sapiens
  SITE 10: note = Phosphorylated residue
KNLAFSPATMAHAFLPTMPEDLLAQARR

SEQ ID NO: 115 - protein, 21 aa, Homo sapiens
  SITE 10: note = Phosphorylated residue
RRVMEELPLMLLSEFSLVDKL

SEQ ID NO: 116 - protein, 25 aa, Homo sapiens
  SITE 13: note = Phosphorylated residue
KQQGLRQDHPGQMDRYLVYGDEYKA

SEQ ID NO: 117 - protein, 20 aa, Homo sapiens
  SITE 9: note = Phosphorylated residue
RVMEELPLMLLSEFSLVDKL

SEQ ID NO: 118 - protein, 14 aa, Homo sapiens
  SITE 2: note = Phosphorylated residue
RMKQPPATTPPFKT

SEQ ID NO: 119 - protein, 16 aa, Homo sapiens
  SITE 6: note = Phosphorylated residue
KTLPTMNNLISQDKRI

SEQ ID NO: 120 - protein, 20 aa, Homo sapiens
  SITE 3: note = Phosphorylated residue
RVMEELPLMLLSEFSLVDKL

SEQ ID NO: 121 - protein, 18 aa, Homo sapiens
  SITE 4: note = Phosphorylated residue
RVSMEETADRLGSIPLRQ

SEQ ID NO: 122 - protein, 16 aa, Homo sapiens
  SITE 14: note = Phosphorylated residue
RLLNFDTELSTKEMRN

SEQ ID NO: 123 - protein, 29 aa, Homo sapiens
  SITE 21: note = Phosphorylated residue
RGIDKQGALLLEQDGVIKPWMGGEISLRS

SEQ ID NO: 124 - protein, 19 aa, Homo sapiens
  SITE 15: note = Phosphorylated residue
RLSQAFIDLHSAGNMLFRT

SEQ ID NO: 125 - protein, 20 aa, Homo sapiens
  SITE 17: note = Phosphorylated residue
KVGFVGISNWALDPAKMNRG

SEQ ID NO: 126 - protein, 16 aa, Homo sapiens
  SITE 6: note = Phosphorylated residue
KTLPTMNNLISQDKRI

SEQ ID NO: 127 - protein, 15 aa, Homo sapiens
  SITE 10: note = Phosphorylated residue
KVHGGTTADMIYSRV

SEQ ID NO: 128 - protein, 18 aa, Homo sapiens
  SITE 4: note = Phosphorylated residue
RVSMEETADRLGSIPLRQ

SEQ ID NO: 129 - protein, 20 aa, Homo sapiens
  SITE 17: note = Phosphorylated residue
KDVVKQQGLRQDHPGQMDRY

SEQ ID NO: 130 - protein, 15 aa, Homo sapiens
  SITE 11: note = Phosphorylated residue
RHDWNYEHLFMDIKN

SEQ ID NO: 131 - protein, 20 aa, Homo sapiens
  SITE 15: note = Phosphorylated residue
RAADFLSEPEGGPEMAKEKQ

SEQ ID NO: 132 - protein, 20 aa, Homo sapiens
  SITE 17: note = Phosphorylated residue
KVGFVGISNWALDPAKMNRG

SEQ ID NO: 133 - protein, 31 aa, Homo sapiens; identical to SEQ ID NO: 27
  SITE 21: note = Phosphorylated residue

SEQ ID NO: 134 - protein, 15 aa, Homo sapiens
  SITE 10: note = Phosphorylated residue
KVHGGTTADMIYSRV

SEQ ID NO: 135 - protein, 18 aa, Homo sapiens
  SITE 4: note = Phosphorylated residue
RVSMEETADRLGSIPLRQ

SEQ ID NO: 136 - protein, 15 aa, Homo sapiens
  SITE 10: note = Phosphorylated residue
KVHGGTTADMIYSRV

SEQ ID NO: 137 - protein, 18 aa, Homo sapiens
  SITE 4: note = Phosphorylated residue
RVSMEETADRLGSIPLRQ

SEQ ID NO: 138 - protein, 12 aa, Homo sapiens
  SITE 5: note = Phosphorylated residue
RSTLMVSDVTRL

SEQ ID NO: 139 - protein, 15 aa, Homo sapiens
  SITE 10: note = Phosphorylated residue
KVHGGTTADMIYSRV

SEQ ID NO: 140 - protein, 18 aa, Homo sapiens
  SITE 14: note = Phosphorylated residue
RATHYHLSSQVQEMAGKI

SEQ ID NO: 141 - protein, 12 aa, Homo sapiens
  SITE 8: note = Phosphorylated residue
RDTLVSYMQTKE

SEQ ID NO: 142 - protein, 25 aa, Homo sapiens
  SITE 19: note = Phosphorylated residue
KSSLLGSGDWHQYYDIVYMKPHGRL

SEQ ID NO: 143 - protein, 25 aa, Homo sapiens
  SITE 19: note = Phosphorylated residue
KSSLLGSGDWHQYYDIVYMKPHGRL

SEQ ID NO: 144 - protein, 20 aa, Homo sapiens
  SITE 3: note = Phosphorylated residue
RVMEELPLMLLSEFSLVDKL

SEQ ID NO: 145 - protein, 16 aa, Homo sapiens
  SITE 4: note = Phosphorylated residue
REQMLDTSSLLQFMRE

SEQ ID NO: 146 - protein, 20 aa, Homo sapiens
  SITE 9: note = Phosphorylated residue
RVMEELPLMLLSEFSLVDKL

SEQ ID NO: 147 - protein, 16 aa, Homo sapiens
  SITE 14: note = Phosphorylated residue
RLLNFDTELSTKEMRN

SEQ ID NO: 148 - protein, 29 aa, Homo sapiens
  SITE 21: note = Phosphorylated residue
RGIDKQGALLLEQDGVIKPWMGGEISLRS

SEQ ID NO: 149 - protein, 20 aa, Homo sapiens
  SITE 17: note = Phosphorylated residue
KVGFVGISNWALDPAKMNRG

SEQ ID NO: 150 - protein, 21 aa, Homo sapiens
  SITE 2: note = Phosphorylated residue
KMLGHSADETIGVVHLVLRRL

SEQ ID NO: 151 - protein, 18 aa, Homo sapiens
  SITE 14: note = Phosphorylated residue
RILTIYPQVLHSLMEARW

SEQ ID NO: 152 - protein, 33 aa, Homo sapiens
  SITE 29: note = Phosphorylated residue
RFQQGKDLQQYVSVVVLDEVGLAEDSPKMPLKT

SEQ ID NO: 153 - protein, 29 aa, Homo sapiens
  SITE 21: note = Phosphorylated residue
RGIDKQGALLLEQDGVIKPWMGGEISLRS

SEQ ID NO: 154 - protein, 16 aa, Homo sapiens
  SITE 14: note = Phosphorylated residue
RLLNFDTELSTKEMRN

SEQ ID NO: 155 - protein, 20 aa, Homo sapiens
  SITE 8: note = Phosphorylated residue
KTIVADAMQGPAAYSDLFRS

SEQ ID NO: 156 - protein, 33 aa, Homo sapiens; identical to SEQ ID NO: 19
  SITE 30: note = Phosphorylated residue

SEQ ID NO: 157 - protein, 29 aa, Homo sapiens
  SITE 21: note = Phosphorylated residue
RGIDKQGALLLEQDGVIKPWMGGEISLRS

SEQ ID NO: 158 - protein, 17 aa, Homo sapiens
  SITE 15: note = Phosphorylated residue
RRLLNFDTELSTKEMRN

SEQ ID NO: 159 - protein, 23 aa, Homo sapiens
  SITE 10: note = Phosphorylated residue
RRVMEELPLMLLSEFSLVDKLRI

SEQ ID NO: 160 - protein, 32 aa, Homo sapiens
  SITE 30: note = Phosphorylated residue
RKLAGILVELAGITGDAAQIVIGAGINVAMRR

SEQ ID NO: 161 - protein, 17 aa, Homo sapiens
  SITE 11: note = Phosphorylated residue
RHDWNYEHLFMDIKNKM

SEQ ID NO: 162 - protein, 21 aa, Homo sapiens
  SITE 2: note = Phosphorylated residue
KMLGHSADETIGVVHLVLRRL

SEQ ID NO: 163 - protein, 33 aa, Homo sapiens; identical to SEQ ID NO: 19
  SITE 30: note = Phosphorylated residue

SEQ ID NO: 164 - protein, 56 aa, Homo sapiens; identical to SEQ ID NO: 22
  SITE 10: note = Phosphorylated residue

SEQ ID NO: 165 - protein, 29 aa, Homo sapiens
  SITE 21: note = Phosphorylated residue
RGIDKQGALLLEQDGVIKPWMGGEISLRS

SEQ ID NO: 166 - protein, 33 aa, Homo sapiens; identical to SEQ ID NO: 152
  SITE 29: note = Phosphorylated residue

SEQ ID NO: 167 - protein, 31 aa, Homo sapiens; identical to SEQ ID NO: 27
  SITE 21: note = Phosphorylated residue

SEQ ID NO: 168 - protein, 20 aa, Homo sapiens
  SITE 17: note = Phosphorylated residue
KVGFVGISNWALDPAKMNRG

SEQ ID NO: 169 - protein, 38 aa, Homo sapiens
  SITE 24: note = Phosphorylated residue
KGGSSEPGTELQTTEQQAGASASMAVDAVAEPANAVKG

SEQ ID NO: 170 - protein, 18 aa, Homo sapiens
  SITE 14: note = Phosphorylated residue
RATHYHLSSQVQEMAGKI

SEQ ID NO: 171 - protein, 15 aa, Homo sapiens
  SITE 10: note = Phosphorylated residue
KVHGGTTADMIYSRV

SEQ ID NO: 172 - protein, 20 aa, Homo sapiens
  SITE 8: note = Phosphorylated residue
KTIVADAMQGPAAYSDLFRS

SEQ ID NO: 173 - protein, 22 aa, Homo sapiens
  SITE 9: note = Phosphorylated residue
RVMEELPLMLLSEFSLVDKLRI

SEQ ID NO: 174 - protein, 18 aa, Homo sapiens
  SITE 14: note = Phosphorylated residue
RATHYHLSSQVQEMAGKI

SEQ ID NO: 175 - protein, 33 aa, Homo sapiens; identical to SEQ ID NO: 152
  SITE 29: note = Phosphorylated residue

SEQ ID NO: 176 - protein, 31 aa, Homo sapiens
  SITE 29: note = Phosphorylated residue
KLAGILVELAGITGDAAQIVIGAGINVAMRR

SEQ ID NO: 177 - protein, 31 aa, Homo sapiens; identical to SEQ ID NO: 27
  SITE 21: note = Phosphorylated residue

SEQ ID NO: 178 - protein, 45 aa, Homo sapiens
  SITE 43: note = Phosphorylated residue
KGGSSEPGTELQTTEQQAGASASMAVDAVAEPANAVKGAGKEMKE

SEQ ID NO: 179 - protein, 22 aa, Homo sapiens
  SITE 9: note = Phosphorylated residue
RVMEELPLMLLSEFSLVDKLRI

SEQ ID NO: 180 - protein, 22 aa, Homo sapiens
  SITE 9: note = Phosphorylated residue
RVMEELPLMLLSEFSLVDKLRI

SEQ ID NO: 181 - protein, 28 aa, Homo sapiens
  SITE 18: note = Phosphorylated residue
KNLAFSPATMAHAFLPTMPEDLLAQARR

SEQ ID NO: 182 - protein, 22 aa, Homo sapiens
  SITE 3: note = Phosphorylated residue
RVMEELPLMLLSEFSLVDKLRI

SEQ ID NO: 183 - protein, 22 aa, Homo sapiens
  SITE 9: note = Phosphorylated residue
RVMEELPLMLLSEFSLVDKLRI

SEQ ID NO: 184 - protein, 20 aa, Homo sapiens
  SITE 15: note = Phosphorylated residue
RAADFLSEPEGGPEMAKEKQ

SEQ ID NO: 185 - protein, 23 aa, Homo sapiens
  SITE 10: note = Phosphorylated residue
RRVMEELPLMLLSEFSLVDKLRI

SEQ ID NO: 186 - protein, 27 aa, Homo sapiens
  SITE 22: note = Phosphorylated residue
KLLSTFLNQTGLDAFLLELHEMIILKL

SEQ ID NO: 187 - protein, 45 aa, Homo sapiens; identical to SEQ ID NO: 178
  SITE 24: note = Phosphorylated residue

SEQ ID NO: 188 - protein, 29 aa, Homo sapiens
  SITE 21: note = Phosphorylated residue
RGIDKQGALLLEQDGVIKPWMGGEISLRS

SEQ ID NO: 189 - protein, 22 aa, Homo sapiens
  SITE 9: note = Phosphorylated residue
RVMEELPLMLLSEFSLVDKLRI

SEQ ID NO: 190 - protein, 33 aa, Homo sapiens; identical to SEQ ID NO: 19
  SITE 30: note = Phosphorylated residue

SEQ ID NO: 191 - protein, 29 aa, Homo sapiens
  SITE 21: note = Phosphorylated residue
RGIDKQGALLLEQDGVIKPWMGGEISLRS

SEQ ID NO: 192 - protein, 45 aa, Homo sapiens; identical to SEQ ID NO: 178
  SITE 43: note = Phosphorylated residue

SEQ ID NO: 193 - protein, 34 aa, Homo sapiens
  SITE 22: note = Phosphorylated residue
RQPEDTWAALEGLSFSPFREQMLDTSSLLQFMRE

SEQ ID NO: 194 - protein, 22 aa, Homo sapiens
  SITE 3: note = Phosphorylated residue
RVMEELPLMLLSEFSLVDKLRI

SEQ ID NO: 195 - protein, 38 aa, Homo sapiens; identical to SEQ ID NO: 169
  SITE 24: note = Phosphorylated residue

SEQ ID NO: 196 - protein, 38 aa, Homo sapiens; identical to SEQ ID NO: 169
  SITE 24: note = Phosphorylated residue

SEQ ID NO: 197 - protein, 22 aa, Homo sapiens
  SITE 3: note = Phosphorylated residue
RVMEELPLMLLSEFSLVDKLRI

SEQ ID NO: 198 - protein, 27 aa, Homo sapiens
  SITE 22: note = Phosphorylated residue
KLLSTFLNQTGLDAFLLELHEMIILKL

SEQ ID NO: 199 - protein, 38 aa, Homo sapiens
  SITE 3: note = Phosphorylated residue
  SITE 32: note = Phosphorylated residue
RDTLVSYMQTKESEILPEMASQFPEEILLASCVSVWKT

SEQ ID NO: 200 - protein, 46 aa, Homo sapiens
  SITE 29: note = Phosphorylated residue
  SITE 40: note = Phosphorylated residue
RFRPQWSLRDTLVSYMQTKESEILPEMASQFPEEILLASCVSVWKT

SEQ ID NO: 201 - protein, 36 aa, Homo sapiens
  SITE 5: note = Phosphorylated residue
  SITE 18: note = Phosphorylated residue
KQEESQFHPLEWLAREACNQDALQEAGTFRHTLWKR

SEQ ID NO: 202 - protein, 60 aa, Homo sapiens
  SITE 19: note = Phosphorylated residue
  SITE 49: note = Phosphorylated residue
KILSPPDISRFATSLVDNSVPLLRAGPSDSNLDGTVTEMAIHAAAVLLCGQNELLEPLKN

SEQ ID NO: 203 - protein, 44 aa, Homo sapiens
  SITE 2: note = Phosphorylated residue
  SITE 26: note = Phosphorylated residue
RNTLKPSPQAWLQLVKNLSMPLELICSDEHMQGSGSLAQAVIRE

SEQ ID NO: 204 - protein, 77 aa, Homo sapiens
  SITE 21: note = Phosphorylated residue
  SITE 40: note = Phosphorylated residue
  SITE 58: note = Phosphorylated residue
  SITE 66: note = Phosphorylated residue
  SITE 67: note = Phosphorylated residue
RFATSLVDNSVPLLRAGPSDSNLDGTVTEMAIHAAAVLLCGQNELLEPLKNLAFSPATMAHAFLPTMPEDLLAQARR

SEQ ID NO: 205 - protein, 64 aa, Homo sapiens
  SITE 7: note = Phosphorylated residue
  SITE 26: note = Phosphorylated residue
  SITE 45: note = Phosphorylated residue
RAGPSDSNLDGTVTEMAIHAAAVLLCGQNELLEPLKNLAFSPATMAHAFLPTMPEDLLAQARRW

SEQ ID NO: 206 - protein, 37 aa, Homo sapiens
  SITE 11: note = Phosphorylated residue
  SITE 16: note = Phosphorylated residue
  SITE 35: note = Phosphorylated residue
KNLSMPLELICSDEHMQGSGSLAQAVIREVRAQWSRI

SEQ ID NO: 207 - protein, 44 aa, Homo sapiens; identical to SEQ ID NO: 203
  SITE 26: note = Phosphorylated residue
  SITE 31: note = Phosphorylated residue
  SITE 36: note = Phosphorylated residue

SEQ ID NO: 208 - skipped

SEQ ID NO: 209 - protein, 60 aa, Homo sapiens; identical to SEQ ID NO: 202
  SITE 30: note = Phosphorylated residue
  SITE 39: note = Phosphorylated residue
  SITE 49: note = Phosphorylated residue
  SITE 52: note = Phosphorylated residue

SEQ ID NO: 210 - protein, 47 aa, Homo sapiens
  SITE 2: note = Phosphorylated residue
  SITE 20: note = Phosphorylated residue
  SITE 26: note = Phosphorylated residue
RNTLKPSPQAWLQLVKNLSMPLELICSDEHMQGSGSLAQAVIREVRA

SEQ ID NO: 211 - protein, 63 aa, Homo sapiens
  SITE 16: note = Phosphorylated residue
  SITE 26: note = Phosphorylated residue
  SITE 37: note = Phosphorylated residue
RAGPSDSNLDGTVTEMAIHAAAVLLCGQNELLEPLKNLAFSPATMAHAFLPTMPEDLLAQARR

SEQ ID NO: 212 - protein, 31 aa, Homo sapiens
  SITE 6: note = Phosphorylated residue
  SITE 27: note = Phosphorylated residue
  SITE 28: note = Phosphorylated residue
KLERLCLTLGIPQATDPDKTYELTTDNMLKI

SEQ ID NO: 213 - protein, 23 aa, Homo sapiens
  SITE 2: note = Phosphorylated residue
  SITE 16: note = Phosphorylated residue
RMKQPPATTPPFKTHCQEAETKT

SEQ ID NO: 214 - protein, 23 aa, Homo sapiens
  SITE 2: note = Phosphorylated residue
  SITE 16: note = Phosphorylated residue
RMKQPPATTPPFKTHCQEAETKT

SEQ ID NO: 215 - protein, 23 aa, Homo sapiens
  SITE 2: note = Phosphorylated residue
  SITE 16: note = Phosphorylated residue
RMKQPPATTPPFKTHCQEAETKT

SEQ ID NO: 216 - protein, 22 aa, Homo sapiens
  SITE 4: note = Phosphorylated residue
  SITE 15: note = Phosphorylated residue
KTHCQEAETKTKDEMAAAEEKV

SEQ ID NO: 217 - protein, 23 aa, Homo sapiens
  SITE 2: note = Phosphorylated residue
  SITE 16: note = Phosphorylated residue
RMKQPPATTPPFKTHCQEAETKT

SEQ ID NO: 218 - protein, 23 aa, Homo sapiens
  SITE 2: note = Phosphorylated residue
  SITE 16: note = Phosphorylated residue
RMKQPPATTPPFKTHCQEAETKT

SEQ ID NO: 219 - protein, 23 aa, Homo sapiens
  SITE 2: note = Phosphorylated residue
  SITE 16: note = Phosphorylated residue
RMKQPPATTPPFKTHCQEAETKT

SEQ ID NO: 220 - protein, 23 aa, Homo sapiens
  SITE 2: note = Phosphorylated residue
  SITE 16: note = Phosphorylated residue
RMKQPPATTPPFKTHCQEAETKT

SEQ ID NO: 221 - protein, 23 aa, Homo sapiens
  SITE 2: note = Phosphorylated residue
  SITE 16: note = Phosphorylated residue
RMKQPPATTPPFKTHCQEAETKT

SEQ ID NO: 222 - protein, 21 aa, Homo sapiens
  SITE 3: note = Phosphorylated residue
  SITE 18: note = Phosphorylated residue
RSCVQSAVGMLRDQNESCTRN

SEQ ID NO: 223 - protein, 12 aa, Homo sapiens
  SITE 4: note = Phosphorylated residue
KSNCTLRDVLRA

SEQ ID NO: 224 - protein, 28 aa, Homo sapiens
  SITE 13: note = Phosphorylated residue
RSLKQVHLVSFQCSPHSTPQGIISTFRQ

SEQ ID NO: 225 - protein, 9 aa, Homo sapiens
  SITE 2: note = Phosphorylated residue
RCVDSLLKM

SEQ ID NO: 226 - protein, 23 aa, Homo sapiens
  SITE 16: note = Phosphorylated residue
RMKQPPATTPPFKTHCQEAETKT

SEQ ID NO: 227 - protein, 34 aa, Homo sapiens
  SITE 22: note = Phosphorylated residue
KESEILPEMASQFPEEILLASCVSVWKTAAVLKW

SEQ ID NO: 228 - protein, 20 aa, Homo sapiens
  SITE 3: note = Phosphorylated residue
RLCGTDEKILANVTEDAKRL

SEQ ID NO: 229 - protein, 23 aa, Homo sapiens
  SITE 19: note = Phosphorylated residue
KHVVPLPDGKSTDFLPVDCPVRS

SEQ ID NO: 230 - protein, 21 aa, Homo sapiens
  SITE 11: note = Phosphorylated residue
RIGELKSGDACIAEYQQAGRG

SEQ ID NO: 231 - protein, 28 aa, Homo sapiens
  SITE 13: note = Phosphorylated residue
RSLKQVHLVSFQCSPHSTPQGIISTFRQ

SEQ ID NO: 232 - protein, 20 aa, Homo sapiens
  SITE 14: note = Phosphorylated residue
RSHNASLHPTPEQCEAVSKF

SEQ ID NO: 233 - protein, 25 aa, Homo sapiens
  SITE 10: note = Phosphorylated residue
KQVHLVSFQCSPHSTPQGIISTFRQ

SEQ ID NO: 234 - protein, 23 aa, Homo sapiens
  SITE 19: note = Phosphorylated residue
KHVVPLPDGKSTDFLPVDCPVRS

SEQ ID NO: 235 - protein, 21 aa, Homo sapiens
  SITE 10: note = Phosphorylated residue
KSLSPQDEQCAVEEALDWRRE

SEQ ID NO: 236 - protein, 19 aa, Homo sapiens
  SITE 6: note = Phosphorylated residue
KSGDACIAEYQQAGRGSRG

SEQ ID NO: 237 - protein, 19 aa, Homo sapiens
  SITE 8: note = Phosphorylated residue
KHSEEMICRLESAGLGYRV

SEQ ID NO: 238 - protein, 19 aa, Homo sapiens
  SITE 6: note = Phosphorylated residue
KSGDACIAEYQQAGRGSRG

SEQ ID NO: 239 - protein, 22 aa, Homo sapiens
  SITE 15: note = Phosphorylated residue
RVVLLLGLLNEDDACHASFLRV

SEQ ID NO: 240 - protein, 28 aa, Homo sapiens
  SITE 14: note = Phosphorylated residue
RSDTEPGMDLWEFCSETFQRPYQYLRRF

SEQ ID NO: 241 - protein, 21 aa, Homo sapiens
  SITE 14: note = Phosphorylated residue
KQPPATTPPFKTHCQEAETKT

SEQ ID NO: 242 - protein, 20 aa, Homo sapiens
  SITE 3: note = Phosphorylated residue
RLCGTDEKILANVTEDAKRL

SEQ ID NO: 243 - protein, 19 aa, Homo sapiens
  SITE 14: note = Phosphorylated residue
RNNTEVERFSEVFCSVQRL

SEQ ID NO: 244 - protein, 28 aa, Homo sapiens
  SITE 22: note = Phosphorylated residue
KESEILPEMASQFPEEILLASCVSVWKT

SEQ ID NO: 245 - protein, 16 aa, Homo sapiens
  SITE 7: note = Phosphorylated residue
KSILLNCATPDAVVRL

SEQ ID NO: 246 - protein, 21 aa, Homo sapiens
  SITE 2: note = Phosphorylated residue
KCLRENSDVKTHGPFEAVMRT

SEQ ID NO: 247 - protein, 9 aa, Homo sapiens
  SITE 2: note = Phosphorylated residue
RCVDSLLKM

SEQ ID NO: 248 - protein, 14 aa, Homo sapiens
  SITE 10: note = Phosphorylated residue
KSTDFLPVDCPVRS

SEQ ID NO: 249 - protein, 21 aa, Homo sapiens
  SITE 14: note = Phosphorylated residue
KQPPATTPPFKTHCQEAETKT

SEQ ID NO: 250 - protein, 20 aa, Homo sapiens
  SITE 14: note = Phosphorylated residue
RSHNASLHPTPEQCEAVSKF

SEQ ID NO: 251 - protein, 28 aa, Homo sapiens
  SITE 22: note = Phosphorylated residue
KESEILPEMASQFPEEILLASCVSVWKT

SEQ ID NO: 252 - protein, 28 aa, Homo sapiens
  SITE 22: note = Phosphorylated residue
KESEILPEMASQFPEEILLASCVSVWKT

SEQ ID NO: 253 - protein, 28 aa, Homo sapiens
  SITE 13: note = Phosphorylated residue
RSLKQVHLVSFQCSPHSTPQGIISTFRQ

SEQ ID NO: 254 - protein, 22 aa, Homo sapiens
  SITE 15: note = Phosphorylated residue
RVVLLLGLLNEDDACHASFLRV

SEQ ID NO: 255 - protein, 17 aa, Homo sapiens
  SITE 6: note = Phosphorylated residue
RGLGLCATALVSYLIRL

SEQ ID NO: 256 - protein, 9 aa, Homo sapiens
  SITE 2: note = Phosphorylated residue
RCVDSLLKM

SEQ ID NO: 257 - protein, 14 aa, Homo sapiens
  SITE 2: note = Phosphorylated residue
KCSEEVSPMQLIKQ

SEQ ID NO: 258 - protein, 19 aa, Homo sapiens
  SITE 14: note = Phosphorylated residue
RNNTEVERFSEVFCSVQRL

SEQ ID NO: 259 - protein, 17 aa, Homo sapiens
  SITE 6: note = Phosphorylated residue
RGLGLCATALVSYLIRL

SEQ ID NO: 260 - protein, 23 aa, Homo sapiens
  SITE 16: note = Phosphorylated residue
RMKQPPATTPPFKTHCQEAETKT

SEQ ID NO: 261 - protein, 21 aa, Homo sapiens
  SITE 14: note = Phosphorylated residue
KQPPATTPPFKTHCQEAETKT

SEQ ID NO: 262 - protein, 22 aa, Homo sapiens
  SITE 11: note = Phosphorylated residue
KTLHPLLEDGCIEDDPAPHKKV

SEQ ID NO: 263 - protein, 20 aa, Homo sapiens
  SITE 10: note = Phosphorylated residue
KSLSPQDEQCAVEEALDWRR

SEQ ID NO: 264 - protein, 23 aa, Homo sapiens
  SITE 16: note = Phosphorylated residue
RMKQPPATTPPFKTHCQEAETKT

SEQ ID NO: 265 - protein, 13 aa, Homo sapiens
  SITE 3: note = Phosphorylated residue
RSCVQSAVGMLRD

SEQ ID NO: 266 - protein, 12 aa, Homo sapiens
  SITE 7: note = Phosphorylated residue
RFSEVFCSVQRL

SEQ ID NO: 267 - protein, 22 aa, Homo sapiens
  SITE 11: note = Phosphorylated residue
KTLHPLLEDGCIEDDPAPHKKV

SEQ ID NO: 268 - protein, 23 aa, Homo sapiens
  SITE 16: note = Phosphorylated residue
RMKQPPATTPPFKTHCQEAETKT

SEQ ID NO: 269 - protein, 14 aa, Homo sapiens
  SITE 2: note = Phosphorylated residue
KCSEEVSPMQLIKQ

SEQ ID NO: 270 - protein, 14 aa, Homo sapiens
  SITE 2: note = Phosphorylated residue
KCSEEVSPMQLIKQ

SEQ ID NO: 271 - protein, 23 aa, Homo sapiens
  SITE 16: note = Phosphorylated residue
RMKQPPATTPPFKTHCQEAETKT

SEQ ID NO: 272 - protein, 20 aa, Homo sapiens
  SITE 3: note = Phosphorylated residue
RLCGTDEKILANVTEDAKRL

SEQ ID NO: 273 - protein, 28 aa, Homo sapiens
  SITE 3: note = Phosphorylated residue
RLCLTLGIPQATDPDKTYELTTDNMLKI

SEQ ID NO: 274 - protein, 21 aa, Homo sapiens
  SITE 11: note = Phosphorylated residue
RIGELKSGDACIAEYQQAGRG

SEQ ID NO: 275 - protein, 24 aa, Homo sapiens
  SITE 4: note = Phosphorylated residue
KGICSSDILVQDRVQGYFASFAKA

SEQ ID NO: 276 - protein, 13 aa, Homo sapiens
  SITE 6: note = Phosphorylated residue
KAVLECKPLGIKT

SEQ ID NO: 277 - protein, 13 aa, Homo sapiens
  SITE 6: note = Phosphorylated residue
KAVLECKPLGIKT

SEQ ID NO: 278 - protein, 14 aa, Homo sapiens
  SITE 10: note = Phosphorylated residue
KSTDFLPVDCPVRS

SEQ ID NO: 279 - protein, 22 aa, Homo sapiens
  SITE 4: note = Phosphorylated residue
KTHCQEAETKTKDEMAAAEEKV

SEQ ID NO: 280 - protein, 23 aa, Homo sapiens
  SITE 16: note = Phosphorylated residue
RMKQPPATTPPFKTHCQEAETKT

SEQ ID NO: 281 - protein, 21 aa, Homo sapiens
  SITE 11: note = Phosphorylated residue
RIGELKSGDACIAEYQQAGRG

SEQ ID NO: 282 - protein, 14 aa, Homo sapiens
  SITE 4: note = Phosphorylated residue
KGICSSDILVQDRV

SEQ ID NO: 283 - protein, 17 aa, Homo sapiens
  SITE 4: note = Phosphorylated residue
REACNQDALQEAGTFRH

SEQ ID NO: 284 - protein, 23 aa, Homo sapiens
  SITE 16: note = Phosphorylated residue
RMKQPPATTPPFKTHCQEAETKT

SEQ ID NO: 285 - protein, 19 aa, Homo sapiens
  SITE 6: note = Phosphorylated residue
KSGDACIAEYQQAGRGSRG

SEQ ID NO: 286 - protein, 33 aa, Homo sapiens
  SITE 16: note = Phosphorylated residue
RSLETNGEINLPKDYCSTDLDLDTEFEILLPRR

SEQ ID NO: 287 - protein, 16 aa, Homo sapiens
  SITE 7: note = Phosphorylated residue
KSILLNCATPDAVVRL

SEQ ID NO: 288 - protein, 20 aa, Homo sapiens
  SITE 3: note = Phosphorylated residue
RLCGTDEKILANVTEDAKRL

SEQ ID NO: 289 - protein, 23 aa, Homo sapiens
  SITE 16: note = Phosphorylated residue
RMKQPPATTPPFKTHCQEAETKT

SEQ ID NO: 290 - protein, 22 aa, Homo sapiens
  SITE 11: note = Phosphorylated residue
KTLHPLLEDGCIEDDPAPHKKV

SEQ ID NO: 291 - protein, 28 aa, Homo sapiens
  SITE 13: note = Phosphorylated residue
RSLKQVHLVSFQCSPHSTPQGIISTFRQ

SEQ ID NO: 292 - protein, 22 aa, Homo sapiens
  SITE 4: note = Phosphorylated residue
KTHCQEAETKTKDEMAAAEEKV

SEQ ID NO: 293 - protein, 27 aa, Homo sapiens
  SITE 14: note = Phosphorylated residue
RSDTEPGMDLWEFCSETFQRPYQYLRR

SEQ ID NO: 294 - protein, 29 aa, Homo sapiens
  SITE 11: note = Phosphorylated residue
KNLSMPLELICSDEHMQGSGSLAQAVIRE

SEQ ID NO: 295 - protein, 33 aa, Homo sapiens; identical to SEQ ID NO: 286
  SITE 16: note = Phosphorylated residue

SEQ ID NO: 296 - protein, 26 aa, Homo sapiens
  SITE 15: note = Phosphorylated residue
KMPLKTLHPLLEDGCIEDDPAPHKKV

SEQ ID NO: 297 - protein, 22 aa, Homo sapiens
  SITE 11: note = Phosphorylated residue
KTLHPLLEDGCIEDDPAPHKKV

SEQ ID NO: 298 - protein, 26 aa, Homo sapiens
  SITE 15: note = Phosphorylated residue
KMPLKTLHPLLEDGCIEDDPAPHKKV

SEQ ID NO: 299 - protein, 22 aa, Homo sapiens
  SITE 11: note = Phosphorylated residue
KTLHPLLEDGCIEDDPAPHKKV

SEQ ID NO: 300 - protein, 20 aa, Homo sapiens
  SITE 14: note = Phosphorylated residue
RSHNASLHPTPEQCEAVSKF

SEQ ID NO: 301 - protein, 40 aa, Homo sapiens
  SITE 38: note = Phosphorylated residue
KNYVALQILQQTFFEGDQQPEIIFGSGFPKDQEYTQLCRN

SEQ ID NO: 302 - protein, 16 aa, Homo sapiens
  SITE 6: note = Phosphorylated residue
KSGDACIAEYQQAGRG

SEQ ID NO: 303 - protein, 22 aa, Homo sapiens
  SITE 11: note = Phosphorylated residue
KTLHPLLEDGCIEDDPAPHKKV

SEQ ID NO: 304 - protein, 22 aa, Homo sapiens
  SITE 11: note = Phosphorylated residue
KTLHPLLEDGCIEDDPAPHKKV

SEQ ID NO: 305 - protein, 28 aa, Homo sapiens
  SITE 13: note = Phosphorylated residue
RSLKQVHLVSFQCSPHSTPQGIISTFRQ

SEQ ID NO: 306 - protein, 29 aa, Homo sapiens
RGIDKQGALLLEQDGVIKPWMGGEISLRS

SEQ ID NO: 307 - protein, 25 aa, Homo sapiens
KSSLLGSGDWHQYYDIVYMKPHGRL

SEQ ID NO: 308 - protein, 13 aa, Homo sapiens
RYKADLSPENAKL

SEQ ID NO: 309 - protein, 23 aa, Homo sapiens
RGMEFVQGLSKPGRPHQWVFPKD

SEQ ID NO: 310 - protein, 12 aa, Homo sapiens
RSTLMVSDVTRL

SEQ ID NO: 311 - protein, 21 aa, Homo sapiens
KHTIALWQFLSAHKSEQLLRL

SEQ ID NO: 312 - protein, 9 aa, Homo sapiens
RFLQGKPRL

SEQ ID NO: 313 - protein, 27 aa, Homo sapiens
RLESAGLGYRVSMEETADRLGSIPLRQ

SEQ ID NO: 314 - protein, 29 aa, Homo sapiens
KQILGQLDGGSVAVLPVVDSTNQYLLDRI

SEQ ID NO: 315 - protein, 12 aa, Homo sapiens
KLDNFINRPVKL

SEQ ID NO: 316 - protein, 14 aa, Homo sapiens
RVPQFSFLDIFPKV

SEQ ID NO: 317 - protein, 13 aa, Homo sapiens
RLLQEQHQLSSRR

SEQ ID NO: 318 - protein, 21 aa, Homo sapiens
KVPGGEQEDAESRYLLVLTKN

SEQ ID NO: 319 - protein, 22 aa, Homo sapiens
RVMEELPLMLLSEFSLVDKLRI

SEQ ID NO: 320 - protein, 21 aa, Homo sapiens
KVPGGEQEDAESRYLLVLTKN

SEQ ID NO: 321 - protein, 15 aa, Homo sapiens
RKPSPQDIAQAVLRN

SEQ ID NO: 322 - protein, 19 aa, Homo sapiens
RLSQAFIDLHSAGNMLFRT

SEQ ID NO: 323 - protein, 14 aa, Homo sapiens
RHAIFTEITTFSRL

SEQ ID NO: 324 - protein, 13 aa, Homo sapiens
RLIAVADSVLTKV

SEQ ID NO: 325 - protein, 25 aa, Homo sapiens
RAAINKHIQTLRDWGVDVFTVPGKG

SEQ ID NO: 326 - protein, 20 aa, Homo sapiens
KDVVKQQGLRQDHPGQMDRY

SEQ ID NO: 327 - protein, 15 aa, Homo sapiens
KKFVDIFQQTPLGRF

SEQ ID NO: 328 - protein, 19 aa, Homo sapiens
RLSQAFIDLHSAGNMLFRT

SEQ ID NO: 329 - protein, 20 aa, Homo sapiens
RAADFLSEPEGGPEMAKEKQ

SEQ ID NO: 330 - protein, 14 aa, Homo sapiens
RMKQPPATTPPFKT

SEQ ID NO: 331 - protein, 17 aa, Homo sapiens
RNDELNHLEEEGRFLKA

SEQ ID NO: 332 - protein, 8 aa, Homo sapiens
RNLEWLKT

SEQ ID NO: 333 - protein, 8 aa, Homo sapiens
RNLEWLKT

SEQ ID NO: 334 - protein, 16 aa, Homo sapiens
RFATSLVDNSVPLLRA

SEQ ID NO: 335 - protein, 24 aa, Homo sapiens
RNFSGKDDIQALDIFLANLPEAKC

SEQ ID NO: 336 - protein, 10 aa, Homo sapiens
RLLLDEITRA

SEQ ID NO: 337 - protein, 23 aa, Homo sapiens
RVSMEETADRLGSIPLRQLVYRV

SEQ ID NO: 338 - protein, 23 aa, Homo sapiens
RGMEFVQGLSKPGRPHQWVFPKD

SEQ ID NO: 339 - protein, 14 aa, Homo sapiens
RVPFNVDFDKLPRH

SEQ ID NO: 340 - protein, 16 aa, Homo sapiens
KTLPTMNNLISQDKRI

SEQ ID NO: 341 - protein, 8 aa, Homo sapiens
RNLEWLKT

SEQ ID NO: 342 - protein, 12 aa, Homo sapiens
RSTLMVSDVTRL

SEQ ID NO: 343 - protein, 11 aa, Homo sapiens
KILSPPDISRF

SEQ ID NO: 344 - protein, 25 aa, Homo sapiens
KLDNFINRPVKLIIGDKEIFGISRG

SEQ ID NO: 345 - protein, 21 aa, Homo sapiens
RGLSQEGTGPPTSAGEGHSRT

SEQ ID NO: 346 - protein, 20 aa, Homo sapiens
KHIQTLRDWGVDVFTVPGKG

SEQ ID NO: 347 - protein, 24 aa, Homo sapiens
RNFSGKDDIQALDIFLANLPEAKC

SEQ ID NO: 348 - protein, 22 aa, Homo sapiens
RVMEELPLMLLSEFSLVDKLRI

SEQ ID NO: 349 - protein, 16 aa, Homo sapiens
KGYSLPEPIPLLNAKQ

SEQ ID NO: 350 - protein, 11 aa, Homo sapiens
RVPFNVDFDKL

SEQ ID NO: 351 - protein, 14 aa, Homo sapiens
RVPFNVDFDKLPRH

SEQ ID NO: 352 - protein, 14 aa, Homo sapiens
RVPFNVDFDKLPRH

SEQ ID NO: 353 - protein, 17 aa, Homo sapiens
KKQEESQFHPLEWLARE

SEQ ID NO: 354 - protein, 20 aa, Homo sapiens
KTSAYSRNDELNHLEEEGRF

SEQ ID NO: 355 - protein, 11 aa, Homo sapiens
RYLVYGDEYKA

SEQ ID NO: 356 - protein, 20 aa, Homo sapiens
KVGFVGISNWALDPAKMNRG

SEQ ID NO: 357 - protein, 17 aa, Homo sapiens
RVLGALLPFLDAQYQKV

SEQ ID NO: 358 - protein, 17 aa, Homo sapiens
KVMNHITDGPRKDLVKG

SEQ ID NO: 359 - protein, 23 aa, Homo sapiens
KTSAYSRNDELNHLEEEGRFLKA

SEQ ID NO: 360 - protein, 16 aa, Homo sapiens
KTLPTMNNLISQDKRI

SEQ ID NO: 361 - protein, 14 aa, Homo sapiens
RVKWPNDLYLQDRK

SEQ ID NO: 362 - protein, 26 aa, Homo sapiens
KLIALLANGEFHSGEQLGETLGMSRA

SEQ ID NO: 363 - protein, 34 aa, Homo sapiens; identical to SEQ ID NO: 40

SEQ ID NO: 364 - protein, 14 aa, Homo sapiens
RLHKEPFGEISSRY

SEQ ID NO: 365 - protein, 15 aa, Homo sapiens
KVHGGTTADMIYSRV

SEQ ID NO: 366 - protein, 10 aa, Homo sapiens
RISSNPVAKI

SEQ ID NO: 367 - protein, 24 aa, Homo sapiens
RNFSGKDDIQALDIFLANLPEAKC

SEQ ID NO: 368 - protein, 24 aa, Homo sapiens
RNFSGKDDIQALDIFLANLPEAKC

SEQ ID NO: 369 - protein, 19 aa, Homo sapiens
RAALELFEQEGLAPYLPRW

SEQ ID NO: 370 - protein, 13 aa, Homo sapiens
RLLNFDTELSTKE

SEQ ID NO: 371 - protein, 26 aa, Homo sapiens
RKLKAASEAPEEEVSLPWVHLAYQRF

SEQ ID NO: 372 - protein, 13 aa, Homo sapiens
KTVNESHGSVERS

SEQ ID NO: 373 - protein, 18 aa, Homo sapiens
RKQPPSDAALTMLSFIKS

SEQ ID NO: 374 - protein, 9 aa, Homo sapiens
KFLSDLRRG

SEQ ID NO: 375 - protein, 12 aa, Homo sapiens
RSTLMVSDVTRL

SEQ ID NO: 376 - protein, 22 aa, Homo sapiens
RVMEELPLMLLSEFSLVDKLRI

SEQ ID NO: 377 - protein, 44 aa, Homo sapiens; identical to SEQ ID NO: 34

SEQ ID NO: 378 - protein, 17 aa, Homo sapiens
RDVMTRDLYQGLLLQRV

SEQ ID NO: 379 - protein, 22 aa, Homo sapiens
RVMEELPLMLLSEFSLVDKLRI

SEQ ID NO: 380 - protein, 26 aa, Homo sapiens
KLIALLANGEFHSGEQLGETLGMSRA

SEQ ID NO: 381 - protein, 11 aa, Homo sapiens
KILSPPDISRF

SEQ ID NO: 382 - protein, 15 aa, Homo sapiens
KVHGGTTADMIYSRV

SEQ ID NO: 383 - protein, 17 aa, Homo sapiens
KNGKERVPILWHFLQKE

SEQ ID NO: 384 - protein, 14 aa, Homo sapiens
RHAIFTEITTFSRL

SEQ ID NO: 385 - protein, 11 aa, Homo sapiens
RLESAGLGYRV

SEQ ID NO: 386 - protein, 11 aa, Homo sapiens
RYLVYGDEYKA

SEQ ID NO: 387 - protein, 11 aa, Homo sapiens
KLLQDISEARC

SEQ ID NO: 388 - protein, 25 aa, Homo sapiens
KSSLLGSGDWHQYYDIVYMKPHGRL

SEQ ID NO: 389 - protein, 12 aa, Homo sapiens
KTHGPFEAVMRT

SEQ ID NO: 390 - protein, 15 aa, Homo sapiens
RQGPRALTEELHQKV

SEQ ID NO: 391 - protein, 9 aa, Homo sapiens
KFLSDLRRG

SEQ ID NO: 392 - protein, 10 aa, Homo sapiens
KLQLPPLERL

SEQ ID NO: 393 - protein, 14 aa, Homo sapiens
RRLLNFDTELSTKE

SEQ ID NO: 394 - protein, 17 aa, Homo sapiens
KIDLLRDSHIFQLFWRE

SEQ ID NO: 395 - protein, 22 aa, Homo sapiens
RLLLDEITRAQDLFLDGVPLRK

SEQ ID NO: 396 - protein, 12 aa, Homo sapiens
RKFIKLHQDLKS

SEQ ID NO: 397 - protein, 56 aa, Homo sapiens; identical to SEQ ID NO: 22

SEQ ID NO: 398 - protein, 9 aa, Homo sapiens
RLRDAAQRH

SEQ ID NO: 399 - protein, 23 aa, Homo sapiens
KTSAYSRNDELNHLEEEGRFLKA

SEQ ID NO: 400 - protein, 17 aa, Homo sapiens
RRLLNFDTELSTKEMRN

SEQ ID NO: 401 - protein, 19 aa, Homo sapiens
KASNRKPSPQDIAQAVLRN

SEQ ID NO: 402 - protein, 34 aa, Homo sapiens; identical to SEQ ID NO: 67

SEQ ID NO: 403 - protein, 38 aa, Homo sapiens; identical to SEQ ID NO: 169

SEQ ID NO: 404 - protein, 18 aa, Homo sapiens
RVSMEETADRLGSIPLRQ

SEQ ID NO: 405 - protein, 10 aa, Homo sapiens
RIIMEQSMRC

SEQ ID NO: 406 - protein, 29 aa, Homo sapiens
RGIDKQGALLLEQDGVIKPWMGGEISLRS

SEQ ID NO: 407 - protein, 25 aa, Homo sapiens
KQQGLRQDHPGQMDRYLVYGDEYKA

SEQ ID NO: 408 - protein, 37 aa, Homo sapiens
KISPDTVLHLILPESPGSHEESREYSLEEVKELLNKL

SEQ ID NO: 409 - protein, 14 aa, Homo sapiens
RVREAENVAFANKD

SEQ ID NO: 410 - protein, 23 aa, Homo sapiens
RGMEFVQGLSKPGRPHQWVFPKD

SEQ ID NO: 411 - protein, 17 aa, Homo sapiens
KIIYGDPVTFLPHLPRK

SEQ ID NO: 412 - protein, 22 aa, Homo sapiens
RVMEELPLMLLSEFSLVDKLRI

SEQ ID NO: 413 - protein, 29 aa, Homo sapiens
RGIDKQGALLLEQDGVIKPWMGGEISLRS

SEQ ID NO: 414 - protein, 9 aa, Homo sapiens
RFLNYQLRD

SEQ ID NO: 415 - protein, 20 aa, Homo sapiens
RFRPQWSLRDTLVSYMQTKE

SEQ ID NO: 416 - protein, 20 aa, Homo sapiens
KDVVKQQGLRQDHPGQMDRY

SEQ ID NO: 417 - protein, 17 aa, Homo sapiens
KVMNHITDGPRKDLVKG

SEQ ID NO: 418 - protein, 19 aa, Homo sapiens
RVPELQGLVTEHVFLLDKC

SEQ ID NO: 419 - protein, 9 aa, Homo sapiens
KFLSDLRRG

SEQ ID NO: 420 - protein, 17 aa, Homo sapiens
KVMNHITDGPRKDLVKG

SEQ ID NO: 421 - protein, 11 aa, Homo sapiens
KILSPPDISRF

SEQ ID NO: 422 - protein, 12 aa, Homo sapiens
RFFPKPYDDSRL

SEQ ID NO: 423 - protein, 17 aa, Homo sapiens
RALTEELHQKVSEEAKS

SEQ ID NO: 424 - protein, 22 aa, Homo sapiens
RVMEELPLMLLSEFSLVDKLRI

SEQ ID NO: 425 - protein, 17 aa, Homo sapiens
RALTEELHQKVSEEAKS

SEQ ID NO: 426 - protein, 25 aa, Homo sapiens
KQGALLLEQDGVIKPWMGGEISLRS

SEQ ID NO: 427 - protein, 20 aa, Homo sapiens
KTIVADAMQGPAAYSDLFRS

SEQ ID NO: 428 - protein, 15 aa, Homo sapiens
RAQDLFLDGVPLRKT

SEQ ID NO: 429 - protein, 11 aa, Homo sapiens
RLSTSSNSQRA

SEQ ID NO: 430 - protein, 14 aa, Homo sapiens
RLHKEPFGEISSRY

SEQ ID NO: 431 - protein, 12 aa, Homo sapiens
KESLLGDMEWRL

SEQ ID NO: 432 - protein, 12 aa, Homo sapiens
RFFPKPYDDSRL

SEQ ID NO: 433 - protein, 25 aa, Homo sapiens
KQQGLRQDHPGQMDRYLVYGDEYKA

SEQ ID NO: 434 - protein, 14 aa, Homo sapiens
RVPFNVDFDKLPRH

SEQ ID NO: 435 - protein, 24 aa, Homo sapiens
RNFSGKDDIQALDIFLANLPEAKC

SEQ ID NO: 436 - protein, 20 aa, Homo sapiens
RQDHPGQMDRYLVYGDEYKA

SEQ ID NO: 437 - protein, 20 aa, Homo sapiens
KDVVKQQGLRQDHPGQMDRY

SEQ ID NO: 438 - protein, 25 aa, Homo sapiens
KQGALLLEQDGVIKPWMGGEISLRS

SEQ ID NO: 439 - protein, 26 aa, Homo sapiens
KLIALLANGEFHSGEQLGETLGMSRA

SEQ ID NO: 440 - protein, 22 aa, Homo sapiens
KDRVEQIKEYHHLHQAVHAAKV

SEQ ID NO: 441 - protein, 18 aa, Homo sapiens
RKQPPSDAALTMLSFIKS

SEQ ID NO: 442 - protein, 10 aa, Homo sapiens
KLQLPPLERL

SEQ ID NO: 443 - protein, 10 aa, Homo sapiens
RLLLDEITRA

SEQ ID NO: 444 - protein, 13 aa, Homo sapiens
RLLNFDTELSTKE

SEQ ID NO: 445 - protein, 15 aa, Homo sapiens
RGSPNETELIESAKG

SEQ ID NO: 446 - protein, 10 aa, Homo sapiens
RYLWQHLKKH

SEQ ID NO: 447 - protein, 20 aa, Homo sapiens
KHIQTLRDWGVDVFTVPGKG

SEQ ID NO: 448 - protein, 25 aa, Homo sapiens
KLDNFINRPVKLIIGDKEIFGISRG

SEQ ID NO: 449 - protein, 14 aa, Homo sapiens
RDWGVDVFTVPGKG

SEQ ID NO: 450 - protein, 29 aa, Homo sapiens
RGIDKQGALLLEQDGVIKPWMGGEISLRS

SEQ ID NO: 451 - protein, 12 aa, Homo sapiens
RDTLVSYMQTKE

SEQ ID NO: 452 - protein, 11 aa, Homo sapiens
KLLQDISEARC

SEQ ID NO: 453 - protein, 25 aa, Homo sapiens
RAAINKHIQTLRDWGVDVFTVPGKG

SEQ ID NO: 454 - protein, 14 aa, Homo sapiens
RVREAENVAFANKD

SEQ ID NO: 455 - protein, 18 aa, Homo sapiens
RQDKEFFGLRDYYSLIKM

SEQ ID NO: 456 - protein, 12 aa, Homo sapiens
RFFPKPYDDSRL

SEQ ID NO: 457 - protein, 22 aa, Homo sapiens
RAPKPTLLWLQQFDTEYSFLKE

SEQ ID NO: 458 - protein, 25 aa, Homo sapiens
RAPKPTLLWLQQFDTEYSFLKEVRN

SEQ ID NO: 459 - protein, 18 aa, Homo sapiens
KTPQSQQSAYFLLTLFRE

SEQ ID NO: 460 - protein, 10 aa, Homo sapiens
RIIMEQSMRC

SEQ ID NO: 461 - protein, 14 aa, Homo sapiens
RAQDLFLDGVPLRK

SEQ ID NO: 462 - protein, 14 aa, Homo sapiens
RSSLTLATAINQRG

SEQ ID NO: 463 - protein, 20 aa, Homo sapiens
KTSAYSRNDELNHLEEEGRF

SEQ ID NO: 464 - protein, 37 aa, Homo sapiens; identical to SEQ ID NO: 408

SEQ ID NO: 465 - protein, 20 aa, Homo sapiens
RVEQIKEYHHLHQAVHAAKV

SEQ ID NO: 466 - protein, 14 aa, Homo sapiens
RSAEKLQLPPLERL

SEQ ID NO: 467 - protein, 15 aa, Homo sapiens
KVHGGTTADMIYSRV

SEQ ID NO: 468 - protein, 24 aa, Homo sapiens
RNFSGKDDIQALDIFLANLPEAKC

SEQ ID NO: 469 - protein, 23 aa, Homo sapiens
KTSAYSRNDELNHLEEEGRFLKA

SEQ ID NO: 470 - protein, 16 aa, Homo sapiens
KTLPTMNNLISQDKRI

SEQ ID NO: 471 - protein, 13 aa, Homo sapiens
KYSVINEINKIRE

SEQ ID NO: 472 - protein, 12 aa, Homo sapiens
RSTLMVSDVTRL

SEQ ID NO: 473 - protein, 12 aa, Homo sapiens
KNQFLDIWQLRE

SEQ ID NO: 474 - protein, 19 aa, Homo sapiens
RYLVYGDEYKALRDAVAKA

SEQ ID NO: 475 - protein, 10 aa, Homo sapiens
KGIPTLVYRH

SEQ ID NO: 476 - protein, 29 aa, Homo sapiens
RGIDKQGALLLEQDGVIKPWMGGEISLRS

SEQ ID NO: 477 - protein, 18 aa, Homo sapiens
RILTIYPQVLHSLMEARW

SEQ ID NO: 478 - protein, 11 aa, Homo sapiens
KLYIQQIVQRL

SEQ ID NO: 479 - protein, 15 aa, Homo sapiens
KVHGGTTADMIYSRV

SEQ ID NO: 480 - protein, 15 aa, Homo sapiens
RVKWPNDLYLQDRKL

SEQ ID NO: 481 - protein, 22 aa, Homo sapiens
RAALELFEQEGLAPYLPRWEKL

SEQ ID NO: 482 - protein, 20 aa, Homo sapiens
RVEQIKEYHHLHQAVHAAKV

SEQ ID NO: 483 - protein, 14 aa, Homo sapiens
RTQTGHVLGNPQRR

SEQ ID NO: 484 - protein, 14 aa, Homo sapiens
RSAEKLQLPPLERL

SEQ ID NO: 485 - protein, 13 aa, Homo sapiens
KHYLDINTVLEKW

SEQ ID NO: 486 - protein, 26 aa, Homo sapiens
KLIALLANGEFHSGEQLGETLGMSRA

SEQ ID NO: 487 - protein, 15 aa, Homo sapiens
KKFVDIFQQTPLGRF

SEQ ID NO: 488 - protein, 29 aa, Homo sapiens
KQILGQLDGGSVAVLPVVDSTNQYLLDRI

SEQ ID NO: 489 - protein, 15 aa, Homo sapiens
KVHGGTTADMIYSRV

SEQ ID NO: 490 - protein, 23 aa, Homo sapiens
RRVMEELPLMLLSEFSLVDKLRI

SEQ ID NO: 491 - protein, 9 aa, Homo sapiens
KFLSDLRRG

SEQ ID NO: 492 - protein, 20 aa, Homo sapiens
RFFPKPYDDSRLLLDEITRA

SEQ ID NO: 493 - protein, 10 aa, Homo sapiens
KLQLPPLERL

SEQ ID NO: 494 - protein, 14 aa, Homo sapiens
RMKQPPATTPPFKT

SEQ ID NO: 495 - protein, 9 aa, Homo sapiens
RDYYSLIKM

SEQ ID NO: 496 - protein, 39 aa, Homo sapiens
RAEDGHEEAMETEASTSGEVAEVAEEAMETESSEKVGKE

SEQ ID NO: 497 - protein, 9 aa, Homo sapiens
RFLNYQLRD

SEQ ID NO: 498 - protein, 37 aa, Homo sapiens; identical to SEQ ID NO: 408

SEQ ID NO: 499 - protein, 10 aa, Homo sapiens
RIIMEQSMRC

SEQ ID NO: 500 - protein, 23 aa, Homo sapiens
RQDHPGQMDRYLVYGDEYKALRD

SEQ ID NO: 501 - protein, 20 aa, Homo sapiens
RFRPQWSLRDTLVSYMQTKE

SEQ ID NO: 502 - protein, 14 aa, Homo sapiens
RMKQPPATTPPFKT

SEQ ID NO: 503 - protein, 27 aa, Homo sapiens
RLIDPQVDESRVLGALLPFLDAQYQKV

SEQ ID NO: 504 - protein, 10 aa, Homo sapiens
RIIMEQSMRC

SEQ ID NO: 505 - protein, 29 aa, Homo sapiens
RGIDKQGALLLEQDGVIKPWMGGEISLRS

SEQ ID NO: 506 - protein, 15 aa, Homo sapiens
KVHGGTTADMIYSRV

SEQ ID NO: 507 - protein, 12 aa, Homo sapiens
RFFPKPYDDSRL

SEQ ID NO: 508 - protein, 17 aa, Homo sapiens
RNTLKPSPQAWLQLVKN

SEQ ID NO: 509 - protein, 22 aa, Homo sapiens
KHMVTMDGVREEDLAPFSLRKR

SEQ ID NO: 510 - protein, 10 aa, Homo sapiens
RIIMEQSMRC

SEQ ID NO: 511 - protein, 28 aa, Homo sapiens
RDWGVDVFTVPGKGYSLPEPIPLLNAKQ

SEQ ID NO: 512 - protein, 23 aa, Homo sapiens
RGPAAIGLGPVIGIVMAEALRKL

SEQ ID NO: 513 - protein, 10 aa, Homo sapiens
RREELLLLKK

SEQ ID NO: 514 - protein, 13 aa, Homo sapiens
RLLNFDTELSTKE

SEQ ID NO: 515 - protein, 15 aa, Homo sapiens
RKPSPQDIAQAVLRN

SEQ ID NO: 516 - protein, 16 aa, Homo sapiens
KHYLDINTVLEKWQKS

SEQ ID NO: 517 - protein, 13 aa, Homo sapiens
KILANVTEDAKRL

SEQ ID NO: 518 - protein, 14 aa, Homo sapiens
RRLLNFDTELSTKE

SEQ ID NO: 519 - protein, 16 aa, Homo sapiens
KGYSLPEPIPLLNAKQ

SEQ ID NO: 520 - protein, 10 aa, Homo sapiens
RIIMEQSMRC

SEQ ID NO: 521 - protein, 12 aa, Homo sapiens
RSTLMVSDVTRL

SEQ ID NO: 522 - protein, 37 aa, Homo sapiens; identical to SEQ ID NO: 408

SEQ ID NO: 523 - protein, 13 aa, Homo sapiens
KPGRPHQWVFPKD

SEQ ID NO: 524 - protein, 17 aa, Homo sapiens
KEIAAVISPELEHLDKT

SEQ ID NO: 525 - protein, 18 aa, Homo sapiens
RATHYHLSSQVQEMAGKI

SEQ ID NO: 526 - protein, 9 aa, Homo sapiens
RYLLVLTKN

SEQ ID NO: 527 - protein, 16 aa, Homo sapiens
REKQHLLSIDEPLFRS

SEQ ID NO: 528 - protein, 10 aa, Homo sapiens
REELLLLKKE

SEQ ID NO: 529 - protein, 13 aa, Homo sapiens
KILANVTEDAKRL

SEQ ID NO: 530 - protein, 11 aa, Homo sapiens
KILSPPDISRF

SEQ ID NO: 531 - protein, 27 aa, Homo sapiens
RLSTSSNSQRATHYHLSSQVQEMAGKI

SEQ ID NO: 532 - protein, 9 aa, Homo sapiens
KILAIEMRF

SEQ ID NO: 533 - protein, 18 aa, Homo sapiens
KSLSPFNDVVDKTPVIRS

SEQ ID NO: 534 - protein, 10 aa, Homo sapiens
RLNDTVTVRL

SEQ ID NO: 535 - protein, 15 aa, Homo sapiens
KIPLFLVGKPGSSKS

SEQ ID NO: 536 - protein, 17 aa, Homo sapiens
KVMNHITDGPRKDLVKG

SEQ ID NO: 537 - protein, 18 aa, Homo sapiens
RATHYHLSSQVQEMAGKI

SEQ ID NO: 538 - protein, 26 aa, Homo sapiens
KLIALLANGEFHSGEQLGETLGMSRA

SEQ ID NO: 539 - protein, 11 aa, Homo sapiens
RYLVYGDEYKA

SEQ ID NO: 540 - protein, 18 aa, Homo sapiens
RATHYHLSSQVQEMAGKI

SEQ ID NO: 541 - protein, 12 aa, Homo sapiens
RDTLVSYMQTKE

SEQ ID NO: 542 - protein, 11 aa, Homo sapiens
RLSTSSNSQRA

SEQ ID NO: 543 - protein, 11 aa, Homo sapiens
RLESAGLGYRV

SEQ ID NO: 544 - protein, 15 aa, Homo sapiens
RAQDLFLDGVPLRKT

SEQ ID NO: 545 - protein, 17 aa, Homo sapiens
RNDELNHLEEEGRFLKA

SEQ ID NO: 546 - protein, 9 aa, Homo sapiens
KILAIEMRF

SEQ ID NO: 547 - protein, 18 aa, Homo sapiens
RATHYHLSSQVQEMAGKI

SEQ ID NO: 548 - protein, 19 aa, Homo sapiens
RAALELFEQEGLAPYLPRW

SEQ ID NO: 549 - protein, 56 aa, Homo sapiens; identical to SEQ ID NO: 22

SEQ ID NO: 550 - protein, 19 aa, Homo sapiens
RYLVYGDEYKALRDAVAKA

SEQ ID NO: 551 - protein, 25 aa, Homo sapiens
KILSPPDISRFATSLVDNSVPLLRA

SEQ ID NO: 552 - protein, 29 aa, Homo sapiens
RFQQGKDLQQYVSVVVLDEVGLAEDSPKM

SEQ ID NO: 553 - protein, 29 aa, Homo sapiens
RFQQGKDLQQYVSVVVLDEVGLAEDSPKM

SEQ ID NO: 554 - protein, 12 aa, Homo sapiens
RDTLVSYMQTKE

SEQ ID NO: 555 - protein, 16 aa, Homo sapiens
RTRVPQFSFLDIFPKV

SEQ ID NO: 556 - protein, 12 aa, Homo sapiens
RFFPKPYDDSRL

SEQ ID NO: 557 - protein, 18 aa, Homo sapiens
KTPQSQQSAYFLLTLFRE

SEQ ID NO: 558 - protein, 26 aa, Homo sapiens
KLIALLANGEFHSGEQLGETLGMSRA

SEQ ID NO: 559 - protein, 15 aa, Homo sapiens
RAQDLFLDGVPLRKT

SEQ ID NO: 560 - protein, 16 aa, Homo sapiens
RLQKVMNHITDGPRKD

SEQ ID NO: 561 - protein, 21 aa, Homo sapiens
RTADNFDDILKHLLTLADVKH

SEQ ID NO: 562 - protein, 23 aa, Homo sapiens
RGMEFVQGLSKPGRPHQWVFPKD

SEQ ID NO: 563 - protein, 11 aa, Homo sapiens
KILSPPDISRF

SEQ ID NO: 564 - protein, 19 aa, Homo sapiens
RYLVYGDEYKALRDAVAKA

SEQ ID NO: 565 - protein, 11 aa, Homo sapiens
KILSPPDISRF

SEQ ID NO: 566 - protein, 24 aa, Homo sapiens
RNFSGKDDIQALDIFLANLPEAKC

SEQ ID NO: 567 - protein, 22 aa, Homo sapiens
RLLLDEITRAQDLFLDGVPLRK

SEQ ID NO: 568 - protein, 15 aa, Homo sapiens
RETVQEFDLEKIQRQ

SEQ ID NO: 569 - protein, 14 aa, Homo sapiens
RNDELNHLEEEGRF

SEQ ID NO: 570 - protein, 11 aa, Homo sapiens
KILSPPDISRF

SEQ ID NO: 571 - protein, 34 aa, Homo sapiens; identical to SEQ ID NO: 40

SEQ ID NO: 572 - protein, 23 aa, Homo sapiens
KTSAYSRNDELNHLEEEGRFLKA

SEQ ID NO: 573 - protein, 43 aa, Homo sapiens
KGYSLPEPIPLLNAKQILGQLDGGSVAVLPVVDSTNQYLLDRI

SEQ ID NO: 574 - protein, 18 aa, Homo sapiens
RENSDVKTHGPFEAVMRT

SEQ ID NO: 575 - protein, 18 aa, Homo sapiens
RKQPPSDAALTMLSFIKS

SEQ ID NO: 576 - protein, 14 aa, Homo sapiens
RRLLNFDTELSTKE

SEQ ID NO: 577 - protein, 29 aa, Homo sapiens
RGIDKQGALLLEQDGVIKPWMGGEISLRS

SEQ ID NO: 578 - protein, 15 aa, Homo sapiens
RKPSPQDIAQAVLRN

SEQ ID NO: 579 - protein, 14 aa, Homo sapiens
KQTLSAAAVFNDRL

SEQ ID NO: 580 - protein, 23 aa, Homo sapiens
RQDHPGQMDRYLVYGDEYKALRD

SEQ ID NO: 581 - protein, 23 aa, Homo sapiens
KTSAYSRNDELNHLEEEGRFLKA

SEQ ID NO: 582 - protein, 10 aa, Homo sapiens
KLQLPPLERL

SEQ ID NO: 583 - protein, 14 aa, Homo sapiens
RRLLNFDTELSTKE

SEQ ID NO: 584 - protein, 14 aa, Homo sapiens
RSAEKLQLPPLERL

SEQ ID NO: 585 - protein, 14 aa, Homo sapiens
RSSLTLATAINQRG

SEQ ID NO: 586 - protein, 16 aa, Homo sapiens
RTRVPQFSFLDIFPKV

SEQ ID NO: 587 - protein, 23 aa, Homo sapiens
RLLLDEITRAQDLFLDGVPLRKT

SEQ ID NO: 588 - protein, 37 aa, Homo sapiens; identical to SEQ ID NO: 408

SEQ ID NO: 589 - protein, 14 aa, Homo sapiens
RMKQPPATTPPFKT

SEQ ID NO: 590 - protein, 22 aa, Homo sapiens
RVMEELPLMLLSEFSLVDKLRI

SEQ ID NO: 591 - protein, 14 aa, Homo sapiens
RHAIFTEITTFSRL

SEQ ID NO: 592 - protein, 18 aa, Homo sapiens
KGFLQQHILKDLEQLAKM

SEQ ID NO: 593 - protein, 29 aa, Homo sapiens
KQILGQLDGGSVAVLPVVDSTNQYLLDRI

SEQ ID NO: 594 - protein, 18 aa, Homo sapiens
RENSDVKTHGPFEAVMRT

SEQ ID NO: 595 - protein, 12 aa, Homo sapiens
RDTLVSYMQTKE

SEQ ID NO: 596 - protein, 17 aa, Homo sapiens
RNDELNHLEEEGRFLKA

SEQ ID NO: 597 - protein, 19 aa, Homo sapiens
RYLVYGDEYKALRDAVAKA

SEQ ID NO: 598 - protein, 15 aa, Homo sapiens
RHDWNYEHLFMDIKN

SEQ ID NO: 599 - protein, 14 aa, Homo sapiens
RLHKEPFGEISSRY

SEQ ID NO: 600 - protein, 35 aa, Homo sapiens
RGLSQEGTGPPTSAGEGHSRTEDAAQELLLPESKG

SEQ ID NO: 601 - protein, 15 aa, Homo sapiens
RHDWNYEHLFMDIKN

SEQ ID NO: 602 - protein, 15 aa, Homo sapiens
KHTIALWQFLSAHKS

SEQ ID NO: 603 - protein, 20 aa, Homo sapiens
KTIVADAMQGPAAYSDLFRS

SEQ ID NO: 604 - protein, 20 aa, Homo sapiens
RIFSTALFVEHVLLGTESRV

SEQ ID NO: 605 - protein, 16 aa, Homo sapiens
RFATSLVDNSVPLLRA

SEQ ID NO: 606 - protein, 59 aa, Homo sapiens; identical to SEQ ID NO: 88

SEQ ID NO: 607 - protein, 25 aa, Homo sapiens
KSSLLGSGDWHQYYDIVYMKPHGRL

SEQ ID NO: 608 - protein, 26 aa, Homo sapiens
RKLKAASEAPEEEVSLPWVHLAYQRF

SEQ ID NO: 609 - protein, 10 aa, Homo sapiens
RLLLDEITRA

SEQ ID NO: 610 - protein, 34 aa, Homo sapiens; identical to SEQ ID NO: 40

SEQ ID NO: 611 - protein, 14 aa, Homo sapiens
KRLIAVADSVLTKV

SEQ ID NO: 612 - protein, 14 aa, Homo sapiens
RVREAENVAFANKD

SEQ ID NO: 613 - protein, 14 aa, Homo sapiens
RMKQPPATTPPFKT

SEQ ID NO: 614 - protein, 14 aa, Homo sapiens
RHAIFTEITTFSRL

SEQ ID NO: 615 - protein, 17 aa, Homo sapiens
KQPPSDAALTMLSFIKS

SEQ ID NO: 616 - protein, 12 aa, Homo sapiens
RLIKFLSDLRRG

SEQ ID NO: 617 - protein, 15 aa, Homo sapiens
RKPSPQDIAQAVLRN

SEQ ID NO: 618 - protein, 14 aa, Homo sapiens
RSAEKLQLPPLERL

SEQ ID NO: 619 - protein, 19 aa, Homo sapiens
RYLVYGDEYKALRDAVAKA

SEQ ID NO: 620 - protein, 14 aa, Homo sapiens
RRLLNFDTELSTKE

SEQ ID NO: 621 - protein, 29 aa, Homo sapiens
RGIDKQGALLLEQDGVIKPWMGGEISLRS

SEQ ID NO: 622 - protein, 18 aa, Homo sapiens
RQDKEFFGLRDYYSLIKM

SEQ ID NO: 623 - protein, 15 aa, Homo sapiens
RKPSPQDIAQAVLRN

SEQ ID NO: 624 - protein, 29 aa, Homo sapiens
RFQQGKDLQQYVSVVVLDEVGLAEDSPKM

SEQ ID NO: 625 - protein, 29 aa, Homo sapiens
KNLAFSPATMAHAFLPTMPEDLLAQARRW

SEQ ID NO: 626 - protein, 12 aa, Homo sapiens
KNQEADVQEVKA

SEQ ID NO: 627 - protein, 14 aa, Homo sapiens
RSAEKLQLPPLERL

SEQ ID NO: 628 - protein, 15 aa, Homo sapiens
RVKWPNDLYLQDRKL

SEQ ID NO: 629 - protein, 26 aa, Homo sapiens
RVHALPPSLIPLVWDFGQLSDVAEKL

SEQ ID NO: 630 - skipped

SEQ ID NO: 631 - protein, 21 aa, Homo sapiens
RGLSQEGTGPPTSAGEGHSRT

SEQ ID NO: 632 - protein, 15 aa, Homo sapiens
KVHGGTTADMIYSRV

SEQ ID NO: 633 - protein, 20 aa, Homo sapiens
KVGFVGISNWALDPAKMNRG

SEQ ID NO: 634 - protein, 9 aa, Homo sapiens
REVAILYRS

SEQ ID NO: 635 - protein, 17 aa, Homo sapiens
RKRITVEYLQHIVEQKN

SEQ ID NO: 636 - protein, 16 aa, Homo sapiens
RFATSLVDNSVPLLRA

SEQ ID NO: 637 - protein, 10 aa, Homo sapiens
RYLWQHLKKH

SEQ ID NO: 638 - protein, 35 aa, Homo sapiens; identical to SEQ ID NO: 600

SEQ ID NO: 639 - protein, 23 aa, Homo sapiens
RLLLDEITRAQDLFLDGVPLRKT

SEQ ID NO: 640 - protein, 17 aa, Homo sapiens
KQPPSDAALTMLSFIKS

SEQ ID NO: 641 - protein, 18 aa, Homo sapiens
KIIYGDPVTFLPHLPRKS

SEQ ID NO: 642 - protein, 22 aa, Homo sapiens
RGPAAIGLGPVIGIVMAEALRK

SEQ ID NO: 643 - protein, 25 aa, Homo sapiens
RLQHVTISQLFAPGDLPELGLEHRA

SEQ ID NO: 644 - protein, 29 aa, Homo sapiens
KQILGQLDGGSVAVLPVVDSTNQYLLDRI

SEQ ID NO: 645 - protein, 71 aa, Homo sapiens; identical to SEQ ID NO: 21

SEQ ID NO: 646 - protein, 13 aa, Homo sapiens
RLLQEQHQLSSRR

SEQ ID NO: 647 - protein, 29 aa, Homo sapiens
RGIDKQGALLLEQDGVIKPWMGGEISLRS

SEQ ID NO: 648 - protein, 18 aa, Homo sapiens
RILTIYPQVLHSLMEARW

SEQ ID NO: 649 - protein, 15 aa, Homo sapiens
KILIFQTDFEDGIRS

SEQ ID NO: 650 - protein, 22 aa, Homo sapiens
RNNWEKEIAAVISPELEHLDKT

SEQ ID NO: 651 - protein, 14 aa, Homo sapiens
KGLEDSVAKTFEKC

SEQ ID NO: 652 - protein, 59 aa, Homo sapiens; identical to SEQ ID NO: 88

SEQ ID NO: 653 - protein, 24 aa, Homo sapiens
RNFSGKDDIQALDIFLANLPEAKC

SEQ ID NO: 654 - protein, 20 aa, Homo sapiens
RQDHPGQMDRYLVYGDEYKA

SEQ ID NO: 655 - protein, 23 aa, Homo sapiens
KTSAYSRNDELNHLEEEGRFLKA

SEQ ID NO: 656 - protein, 18 aa, Homo sapiens
RVSMEETADRLGSIPLRQ

SEQ ID NO: 657 - protein, 10 aa, Homo sapiens
RFRPQWSLRD

SEQ ID NO: 658 - protein, 20 aa, Homo sapiens
KTIVADAMQGPAAYSDLFRS

SEQ ID NO: 659 - protein, 21 aa, Homo sapiens
RGLSQEGTGPPTSAGEGHSRT

SEQ ID NO: 660 - protein, 14 aa, Homo sapiens
RRLLNFDTELSTKE

SEQ ID NO: 661 - protein, 12 aa, Homo sapiens
KTHGPFEAVMRT

SEQ ID NO: 662 - protein, 12 aa, Homo sapiens
RDTLVSYMQTKE

SEQ ID NO: 663 - protein, 17 aa, Homo sapiens
KVMNHITDGPRKDLVKG

SEQ ID NO: 664 - protein, 25 aa, Homo sapiens
RAAINKHIQTLRDWGVDVFTVPGKG

SEQ ID NO: 665 - protein, 18 aa, Homo sapiens
RENSDVKTHGPFEAVMRT

SEQ ID NO: 666 - protein, 20 aa, Homo sapiens
KHIQTLRDWGVDVFTVPGKG

SEQ ID NO: 667 - protein, 17 aa, Homo sapiens
RNDELNHLEEEGRFLKA

SEQ ID NO: 668 - protein, 11 aa, Homo sapiens
RNTLAATLIRE

SEQ ID NO: 669 - protein, 18 aa, Homo sapiens
KIIYGDPVTFLPHLPRKS

SEQ ID NO: 670 - protein, 19 aa, Homo sapiens
RNLEWLKTVNESHGSVERS

SEQ ID NO: 671 - protein, 23 aa, Homo sapiens
RLLLDEITRAQDLFLDGVPLRKT

SEQ ID NO: 672 - protein, 10 aa, Homo sapiens
RLLLDEITRA

SEQ ID NO: 673 - protein, 11 aa, Homo sapiens
KHMVTMDGVRE

SEQ ID NO: 674 - protein, 21 aa, Homo sapiens
RGLSQEGTGPPTSAGEGHSRT

SEQ ID NO: 675 - protein, 13 aa, Homo sapiens
RLHNEIVYAVEKL

SEQ ID NO: 676 - protein, 12 aa, Homo sapiens
KNQFLDIWQLRE

SEQ ID NO: 677 - protein, 38 aa, Homo sapiens; identical to SEQ ID NO: 169

SEQ ID NO: 678 - protein, 24 aa, Homo sapiens
KDLQQYVSVVVLDEVGLAEDSPKM

SEQ ID NO: 679 - protein, 18 aa, Homo sapiens
RKQPPSDAALTMLSFIKS

SEQ ID NO: 680 - protein, 11 aa, Homo sapiens
KILSPPDISRF

SEQ ID NO: 681 - protein, 16 aa, Homo sapiens
KGYSLPEPIPLLNAKQ

SEQ ID NO: 682 - protein, 14 aa, Homo sapiens
KRLIAVADSVLTKV

SEQ ID NO: 683 - protein, 18 aa, Homo sapiens
RENSDVKTHGPFEAVMRT

SEQ ID NO: 684 - protein, 13 aa, Homo sapiens
RAAINKHIQTLRD

SEQ ID NO: 685 - protein, 16 aa, Homo sapiens
REKQHLLSIDEPLFRS

SEQ ID NO: 686 - protein, 16 aa, Homo sapiens
RTRVPQFSFLDIFPKV

SEQ ID NO: 687 - protein, 14 aa, Homo sapiens
RSSLTLATAINQRG

SEQ ID NO: 688 - protein, 21 aa, Homo sapiens
RHNSFADFLQAHLHTADLERH

SEQ ID NO: 689 - protein, 18 aa, Homo sapiens
RATHYHLSSQVQEMAGKI

SEQ ID NO: 690 - protein, 14 aa, Homo sapiens
RSSLTLATAINQRG

SEQ ID NO: 691 - protein, 15 aa, Homo sapiens
KHLIQVDFGVLAVRH

SEQ ID NO: 692 - protein, 25 aa, Homo sapiens
KQQGLRQDHPGQMDRYLVYGDEYKA

SEQ ID NO: 693 - protein, 12 aa, Homo sapiens
KLDNFINRPVKL

SEQ ID NO: 694 - protein, 20 aa, Homo sapiens
RGREPANEASVEYLQEVARI

SEQ ID NO: 695 - protein, 11 aa, Homo sapiens
RYLVYGDEYKA

SEQ ID NO: 696 - protein, 15 aa, Homo sapiens
KKFVDIFQQTPLGRF

SEQ ID NO: 697 - protein, 12 aa, Homo sapiens
REEDLAPFSLRK

SEQ ID NO: 698 - protein, 23 aa, Homo sapiens
RGMEFVQGLSKPGRPHQWVFPKD

SEQ ID NO: 699 - protein, 18 aa, Homo sapiens
RVSMEETADRLGSIPLRQ

SEQ ID NO: 700 - protein, 15 aa, Homo sapiens
KVHGGTTADMIYSRV

SEQ ID NO: 701 - protein, 16 aa, Homo sapiens
RFATSLVDNSVPLLRA

SEQ ID NO: 702 - protein, 12 aa, Homo sapiens
KTHGPFEAVMRT

SEQ ID NO: 703 - protein, 12 aa, Homo sapiens
RVPILWHFLQKE

SEQ ID NO: 704 - protein, 17 aa, Homo sapiens
KQPPSDAALTMLSFIKS

SEQ ID NO: 705 - protein, 22 aa, Homo sapiens
RVMEELPLMLLSEFSLVDKLRI

SEQ ID NO: 706 - protein, 21 aa, Homo sapiens
RTADNFDDILKHLLTLADVKH

SEQ ID NO: 707 - protein, 18 aa, Homo sapiens
KKVGFVGISNWALDPAKM

SEQ ID NO: 708 - protein, 20 aa, Homo sapiens
RGREPANEASVEYLQEVARI

SEQ ID NO: 709 - protein, 12 aa, Homo sapiens
KALDKDQYLPRK

SEQ ID NO: 710 - protein, 18 aa, Homo sapiens
KKVGFVGISNWALDPAKM

SEQ ID NO: 711 - protein, 14 aa, Homo sapiens
RDWGVDVFTVPGKG

SEQ ID NO: 712 - protein, 23 aa, Homo sapiens
RGMEFVQGLSKPGRPHQWVFPKD

SEQ ID NO: 713 - protein, 23 aa, Homo sapiens
RQRHNSFADFLQAHLHTADLERH

SEQ ID NO: 714 - protein, 14 aa, Homo sapiens
RHAIFTEITTFSRL

SEQ ID NO: 715 - protein, 9 aa, Homo sapiens
RFLNYQLRD

SEQ ID NO: 716 - protein, 23 aa, Homo sapiens
KTSAYSRNDELNHLEEEGRFLKA

SEQ ID NO: 717 - protein, 16 aa, Homo sapiens
RLHNEIVYAVEKLSKE

SEQ ID NO: 718 - protein, 13 aa, Homo sapiens
RLHNEIVYAVEKL

SEQ ID NO: 719 - protein, 18 aa, Homo sapiens
RATHYHLSSQVQEMAGKI

SEQ ID NO: 720 - protein, 14 aa, Homo sapiens
RLHKEPFGEISSRY

SEQ ID NO: 721 - protein, 18 aa, Homo sapiens
KSLSPFNDVVDKTPVIRS

SEQ ID NO: 722 - protein, 20 aa, Homo sapiens
KTSAYSRNDELNHLEEEGRF

SEQ ID NO: 723 - protein, 11 aa, Homo sapiens
KILSPPDISRF

SEQ ID NO: 724 - protein, 18 aa, Homo sapiens
RATHYHLSSQVQEMAGKI

SEQ ID NO: 725 - protein, 16 aa, Homo sapiens
REQMLDTSSLLQFMRE

SEQ ID NO: 726 - protein, 9 aa, Homo sapiens
KILAIEMRF

SEQ ID NO: 727 - protein, 15 aa, Homo sapiens
RGSPNETELIESAKG

SEQ ID NO: 728 - protein, 15 aa, Homo sapiens
RLVKFLPEILALQRD

SEQ ID NO: 729 - protein, 10 aa, Homo sapiens
RIIMEQSMRC

SEQ ID NO: 730 - protein, 15 aa, Homo sapiens
KLIIGDKEIFGISRG

SEQ ID NO: 731 - protein, 12 aa, Homo sapiens
RVQGYFASFAKA

SEQ ID NO: 732 - protein, 29 aa, Homo sapiens
RGIDKQGALLLEQDGVIKPWMGGEISLRS

SEQ ID NO: 733 - protein, 20 aa, Homo sapiens
KTSAYSRNDELNHLEEEGRF

SEQ ID NO: 734 - protein, 23 aa, Homo sapiens
KTSAYSRNDELNHLEEEGRFLKA

SEQ ID NO: 735 - protein, 34 aa, Homo sapiens; identical to SEQ ID NO: 40

SEQ ID NO: 736 - protein, 17 aa, Homo sapiens
KVMNHITDGPRKDLVKG

SEQ ID NO: 737 - protein, 19 aa, Homo sapiens
RAALELFEQEGLAPYLPRW

SEQ ID NO: 738 - protein, 17 aa, Homo sapiens
KVMNHITDGPRKDLVKG

SEQ ID NO: 739 - protein, 18 aa, Homo sapiens
KADRTQTGHVLGNPQRRD

SEQ ID NO: 740 - protein, 14 aa, Homo sapiens
RMKQPPATTPPFKT

SEQ ID NO: 741 - protein, 13 aa, Homo sapiens
RLLNFDTELSTKE

SEQ ID NO: 742 - protein, 11 aa, Homo sapiens
KHVVPLPDGKS

SEQ ID NO: 743 - protein, 17 aa, Homo sapiens
RALTEELHQKVSEEAKS

SEQ ID NO: 744 - protein, 17 aa, Homo sapiens
KQPPSDAALTMLSFIKS

SEQ ID NO: 745 - protein, 36 aa, Homo sapiens
RAEDGHEEAMETEASTSGEVAEVAEEAMETESSEKV

SEQ ID NO: 746 - protein, 17 aa, Homo sapiens
KEIAAVISPELEHLDKT

SEQ ID NO: 747 - protein, 32 aa, Homo sapiens; identical to SEQ ID NO: 160

SEQ ID NO: 748 - protein, 12 aa, Homo sapiens
RKFIKLHQDLKS

SEQ ID NO: 749 - protein, 20 aa, Homo sapiens
RVQGAVTPLLASMISFIDRD

SEQ ID NO: 750 - protein, 56 aa, Homo sapiens; identical to SEQ ID NO: 22

SEQ ID NO: 751 - protein, 13 aa, Homo sapiens
RLLNFDTELSTKE

SEQ ID NO: 752 - protein, 14 aa, Homo sapiens
RSAEKLQLPPLERL

SEQ ID NO: 753 - protein, 15 aa, Homo sapiens
RLVESISLDENGTRV

SEQ ID NO: 754 - protein, 14 aa, Homo sapiens
RHAIFTEITTFSRL

SEQ ID NO: 755 - protein, 20 aa, Homo sapiens
RGREPANEASVEYLQEVARI

SEQ ID NO: 756 - protein, 16 aa, Homo sapiens
RFATSLVDNSVPLLRA

SEQ ID NO: 757 - protein, 15 aa, Homo sapiens
RVKWPNDLYLQDRKL

SEQ ID NO: 758 - protein, 14 aa, Homo sapiens
RLHKEPFGEISSRY

SEQ ID NO: 759 - protein, 15 aa, Homo sapiens
RAQDLFLDGVPLRKT

SEQ ID NO: 760 - protein, 18 aa, Homo sapiens
RILTIYPQVLHSLMEARW

SEQ ID NO: 761 - protein, 12 aa, Homo sapiens
KALDKDQYLPRK

SEQ ID NO: 762 - protein, 11 aa, Homo sapiens
KRYLWQHLKKH

SEQ ID NO: 763 - protein, 21 aa, Homo sapiens
KHMVTMDGVREEDLAPFSLRK

SEQ ID NO: 764 - protein, 12 aa, Homo sapiens
RDLYQGLLLQRV

SEQ ID NO: 765 - protein, 17 aa, Homo sapiens
KQPPSDAALTMLSFIKS

SEQ ID NO: 766 - protein, 13 aa, Homo sapiens
RLIAVADSVLTKV

SEQ ID NO: 767 - protein, 17 aa, Homo sapiens
RALTEELHQKVSEEAKS

SEQ ID NO: 768 - protein, 17 aa, Homo sapiens
KVMNHITDGPRKDLVKG

SEQ ID NO: 769 - protein, 23 aa, Homo sapiens
RATHYHLSSQVQEMAGKIDLLRD

SEQ ID NO: 770 - protein, 9 aa, Homo sapiens
REELLLLKK

SEQ ID NO: 771 - protein, 31 aa, Homo sapiens; identical to SEQ ID NO: 27

SEQ ID NO: 772 - protein, 9 aa, Homo sapiens
RYLWQHLKK

SEQ ID NO: 773 - protein, 18 aa, Homo sapiens
KVYSLLFADQLSYEVARQ

SEQ ID NO: 774 - protein, 15 aa, Homo sapiens
KVHGGTTADMIYSRV

SEQ ID NO: 775 - protein, 17 aa, Homo sapiens
KIIYGDPVTFLPHLPRK

SEQ ID NO: 776 - protein, 15 aa, Homo sapiens
RLQKVMNHITDGPRK

SEQ ID NO: 777 - protein, 37 aa, Homo sapiens; identical to SEQ ID NO: 408

SEQ ID NO: 778 - protein, 15 aa, Homo sapiens
RWEKLDNFINRPVKL

SEQ ID NO: 779 - protein, 12 aa, Homo sapiens
RLIKFLSDLRRG

SEQ ID NO: 780 - protein, 56 aa, Homo sapiens; identical to SEQ ID NO: 22

SEQ ID NO: 781 - protein, 14 aa, Homo sapiens
KNQFLDIWQLREKS

SEQ ID NO: 782 - protein, 15 aa, Homo sapiens
KHTIALWQFLSAHKS

SEQ ID NO: 783 - protein, 12 aa, Homo sapiens
KFLPEILALQRD

SEQ ID NO: 784 - protein, 15 aa, Homo sapiens
RTQTGHVLGNPQRRD

SEQ ID NO: 785 - protein, 10 aa, Homo sapiens
RLLLDEITRA

SEQ ID NO: 786 - protein, 11 aa, Homo sapiens
RYLVYGDEYKA

SEQ ID NO: 787 - protein, 23 aa, Homo sapiens
KDNAPPEKEVIESLLSLLFVQKG

SEQ ID NO: 788 - protein, 14 aa, Homo sapiens
RSAEKLQLPPLERL

SEQ ID NO: 789 - protein, 15 aa, Homo sapiens
KVHGGTTADMIYSRV

SEQ ID NO: 790 - protein, 17 aa, Homo sapiens
KVGFVGISNWALDPAKM

SEQ ID NO: 791 - protein, 17 aa, Homo sapiens
RNDELNHLEEEGRFLKA

SEQ ID NO: 792 - protein, 14 aa, Homo sapiens
RVPQFSFLDIFPKV

SEQ ID NO: 793 - protein, 11 aa, Homo sapiens
RLESAGLGYRV

SEQ ID NO: 794 - protein, 14 aa, Homo sapiens
RVKWPNDLYLQDRK

SEQ ID NO: 795 - protein, 14 aa, Homo sapiens
KQHLLSIDEPLFRS

SEQ ID NO: 796 - protein, 13 aa, Homo sapiens
RYKADLSPENAKL

SEQ ID NO: 797 - protein, 29 aa, Homo sapiens
RGIDKQGALLLEQDGVIKPWMGGEISLRS

SEQ ID NO: 798 - protein, 13 aa, Homo sapiens
KILANVTEDAKRL

SEQ ID NO: 799 - protein, 14 aa, Homo sapiens
RLHKEPFGEISSRY

SEQ ID NO: 800 - protein, 22 aa, Homo sapiens
KHMVTMDGVREEDLAPFSLRKR

SEQ ID NO: 801 - protein, 16 aa, Homo sapiens
RETLDQINQELIQAKK

SEQ ID NO: 802 - protein, 14 aa, Homo sapiens
RRLLNFDTELSTKE

SEQ ID NO: 803 - protein, 15 aa, Homo sapiens
RWEKLDNFINRPVKL

SEQ ID NO: 804 - protein, 18 aa, Homo sapiens
RVSMEETADRLGSIPLRQ

SEQ ID NO: 805 - protein, 16 aa, Homo sapiens
RTRVPQFSFLDIFPKV

SEQ ID NO: 806 - protein, 24 aa, Homo sapiens
RDLYQGLLLQRVPFNVDFDKLPRH

SEQ ID NO: 807 - protein, 14 aa, Homo sapiens
RNDELNHLEEEGRF

SEQ ID NO: 808 - protein, 14 aa, Homo sapiens
RSSLTLATAINQRG

SEQ ID NO: 809 - protein, 17 aa, Homo sapiens
KQPPSDAALTMLSFIKS

SEQ ID NO: 810 - protein, 14 aa, Homo sapiens
RNDELNHLEEEGRF

SEQ ID NO: 811 - protein, 23 aa, Homo sapiens
RATHYHLSSQVQEMAGKIDLLRD

SEQ ID NO: 812 - protein, 15 aa, Homo sapiens
RDLSHILGIPQSWRL

SEQ ID NO: 813 - protein, 11 aa, Homo sapiens
RGIYVIQAPKG

SEQ ID NO: 814 - protein, 14 aa, Homo sapiens
KQTLSAAAVFNDRL

SEQ ID NO: 815 - protein, 24 aa, Homo sapiens
RNFSGKDDIQALDIFLANLPEAKC

SEQ ID NO: 816 - protein, 20 aa, Homo sapiens
RQDHPGQMDRYLVYGDEYKA

SEQ ID NO: 817 - protein, 12 aa, Homo sapiens
RTADNFDDILKH

SEQ ID NO: 818 - protein, 16 aa, Homo sapiens
KQFQNVQQVEYSSIRG

SEQ ID NO: 819 - protein, 21 aa, Homo sapiens
KMLGHSADETIGVVHLVLRRL

SEQ ID NO: 820 - protein, 25 aa, Homo sapiens
KLDNFINRPVKLIIGDKEIFGISRG

SEQ ID NO: 821 - protein, 13 aa, Homo sapiens
RLLNFDTELSTKE

SEQ ID NO: 822 - protein, 23 aa, Homo sapiens
KRGPAAIGLGPVIGIVMAEALRK

SEQ ID NO: 823 - protein, 13 aa, Homo sapiens
RLLNFDTELSTKE

SEQ ID NO: 824 - protein, 14 aa, Homo sapiens
RMKQPPATTPPFKT

SEQ ID NO: 825 - protein, 12 aa, Homo sapiens
KTHGPFEAVMRT

SEQ ID NO: 826 - protein, 34 aa, Homo sapiens; identical to SEQ ID NO: 40

SEQ ID NO: 827 - protein, 19 aa, Homo sapiens
KETSELGGSDVSILDTTRL

SEQ ID NO: 828 - protein, 23 aa, Homo sapiens
RLSVFLKKQEESQFHPLEWLARE

SEQ ID NO: 829 - protein, 12 aa, Homo sapiens
KILANVTEDAKR

SEQ ID NO: 830 - protein, 14 aa, Homo sapiens
RVPQFSFLDIFPKV

SEQ ID NO: 831 - protein, 20 aa, Homo sapiens
RGREPANEASVEYLQEVARI

SEQ ID NO: 832 - protein, 19 aa, Homo sapiens
RNLEWLKTVNESHGSVERS

SEQ ID NO: 833 - protein, 18 aa, Homo sapiens
RDFATPSLHTSDQSPGKH

SEQ ID NO: 834 - protein, 10 aa, Homo sapiens
RIIMEQSMRC

SEQ ID NO: 835 - protein, 59 aa, Homo sapiens; identical to SEQ ID NO: 88

SEQ ID NO: 836 - protein, 17 aa, Homo sapiens
KVGFVGISNWALDPAKM

SEQ ID NO: 837 - protein, 29 aa, Homo sapiens
RGIDKQGALLLEQDGVIKPWMGGEISLRS

SEQ ID NO: 838 - protein, 12 aa, Homo sapiens
RDSHIFQLFWRE

SEQ ID NO: 839 - protein, 15 aa, Homo sapiens
RKPSPQDIAQAVLRN

SEQ ID NO: 840 - protein, 44 aa, Homo sapiens; identical to SEQ ID NO: 34

SEQ ID NO: 841 - protein, 14 aa, Homo sapiens
RVPFNVDFDKLPRH

SEQ ID NO: 842 - protein, 71 aa, Homo sapiens; identical to SEQ ID NO: 21

SEQ ID NO: 843 - protein, 16 aa, Homo sapiens
RTRVPQFSFLDIFPKV

SEQ ID NO: 844 - protein, 14 aa, Homo sapiens
RYLVYGDEYKALRD

SEQ ID NO: 845 - protein, 12 aa, Homo sapiens
RSTLMVSDVTRL

SEQ ID NO: 846 - protein, 18 aa, Homo sapiens
KIIYGDPVTFLPHLPRKS

SEQ ID NO: 847 - protein, 15 aa, Homo sapiens
RGIYVIQAPKGGQKI

SEQ ID NO: 848 - protein, 11 aa, Homo sapiens
KYSVINEINKI

SEQ ID NO: 849 - protein, 18 aa, Homo sapiens
KVYSLLFADQLSYEVARQ

SEQ ID NO: 850 - protein, 20 aa, Homo sapiens
KTIVADAMQGPAAYSDLFRS

SEQ ID NO: 851 - protein, 26 aa, Homo sapiens
KVFVTPQAPLEAIQAYLAGHYRVPKQ

SEQ ID NO: 852 - protein, 13 aa, Homo sapiens
RAAINKHIQTLRD

SEQ ID NO: 853 - protein, 12 aa, Homo sapiens
KFLPEILALQRD

SEQ ID NO: 854 - protein, 21 aa, Homo sapiens
RHNSFADFLQAHLHTADLERH

SEQ ID NO: 855 - protein, 13 aa, Homo sapiens
RRSTLMVSDVTRL

SEQ ID NO: 856 - protein, 23 aa, Homo sapiens
KDNAPPEKEVIESLLSLLFVQKG

SEQ ID NO: 857 - protein, 34 aa, Homo sapiens
RRVEESVVNQGWITLQEAGINLDRNTLAATLIRE

SEQ ID NO: 858 - protein, 24 aa, Homo sapiens
KILIFQTDFEDGIRSAQLIASAKY

SEQ ID NO: 859 - protein, 16 aa, Homo sapiens
KQEESQFHPLEWLARE

SEQ ID NO: 860 - protein, 17 aa, Homo sapiens
KVMNHITDGPRKDLVKG

SEQ ID NO: 861 - protein, 12 aa, Homo sapiens
RDTLVSYMQTKE

SEQ ID NO: 862 - protein, 22 aa, Homo sapiens
RVMEELPLMLLSEFSLVDKLRI

SEQ ID NO: 863 - protein, 12 aa, Homo sapiens
RVPILWHFLQKE

SEQ ID NO: 864 - protein, 14 aa, Homo sapiens
RSAEKLQLPPLERL

SEQ ID NO: 865 - protein, 34 aa, Homo sapiens; identical to SEQ ID NO: 40

SEQ ID NO: 866 - protein, 15 aa, Homo sapiens
KVHGGTTADMIYSRV

SEQ ID NO: 867 - protein, 25 aa, Homo sapiens
RLVEIQFPAEHGWKESLLGDMEWRL

SEQ ID NO: 868 - protein, 17 aa, Homo sapiens
RDVMTRDLYQGLLLQRV

SEQ ID NO: 869 - protein, 13 aa, Homo sapiens
RLLNFDTELSTKE

SEQ ID NO: 870 - protein, 23 aa, Homo sapiens
KRGPAAIGLGPVIGIVMAEALRK

SEQ ID NO: 871 - protein, 17 aa, Homo sapiens
RVLGALLPFLDAQYQKV

SEQ ID NO: 872 - protein, 17 aa, Homo sapiens
RALTEELHQKVSEEAKS

SEQ ID NO: 873 - protein, 16 aa, Homo sapiens
RLLNFDTELSTKEMRN

SEQ ID NO: 874 - protein, 26 aa, Homo sapiens
KLIALLANGEFHSGEQLGETLGMSRA

SEQ ID NO: 875 - protein, 19 aa, Homo sapiens
RNLEWLKTVNESHGSVERS

SEQ ID NO: 876 - protein, 19 aa, Homo sapiens
KDDIQALDIFLANLPEAKC

SEQ ID NO: 877 - protein, 12 aa, Homo sapiens
KRQDKEFFGLRD

SEQ ID NO: 878 - protein, 16 aa, Homo sapiens
RTRVPQFSFLDIFPKV

SEQ ID NO: 879 - protein, 17 aa, Homo sapiens
RVPILWHFLQKEAELRL

SEQ ID NO: 880 - protein, 11 aa, Homo sapiens
KASWTVQESKK

SEQ ID NO: 881 - protein, 17 aa, Homo sapiens
KVGFVGISNWALDPAKM

SEQ ID NO: 882 - protein, 16 aa, Homo sapiens
KTLPTMNNLISQDKRI

SEQ ID NO: 883 - protein, 20 aa, Homo sapiens
RFFPKPYDDSRLLLDEITRA

SEQ ID NO: 884 - protein, 21 aa, Homo sapiens
RGLSQEGTGPPTSAGEGHSRT

SEQ ID NO: 885 - protein, 20 aa, Homo sapiens
RQPEDTWAALEGLSFSPFRE

SEQ ID NO: 886 - protein, 18 aa, Homo sapiens
KGFLQQHILKDLEQLAKM

SEQ ID NO: 887 - protein, 16 aa, Homo sapiens
RFATSLVDNSVPLLRA

SEQ ID NO: 888 - protein, 12 aa, Homo sapiens
RDSHIFQLFWRE

SEQ ID NO: 889 - protein, 13 aa, Homo sapiens
RRSTLMVSDVTRL

SEQ ID NO: 890 - protein, 11 aa, Homo sapiens
RLESAGLGYRV

SEQ ID NO: 891 - protein, 14 aa, Homo sapiens
RSSLTLATAINQRG

SEQ ID NO: 892 - protein, 24 aa, Homo sapiens
RNFSGKDDIQALDIFLANLPEAKC

SEQ ID NO: 893 - protein, 29 aa, Homo sapiens
KQILGQLDGGSVAVLPVVDSTNQYLLDRI

SEQ ID NO: 894 - protein, 22 aa, Homo sapiens
RAPKPTLLWLQQFDTEYSFLKE

SEQ ID NO: 895 - protein, 18 aa, Homo sapiens
KIIYGDPVTFLPHLPRKS

SEQ ID NO: 896 - protein, 14 aa, Homo sapiens
KQTLSAAAVFNDRL

SEQ ID NO: 897 - protein, 14 aa, Homo sapiens
RNDELNHLEEEGRF

SEQ ID NO: 898 - protein, 16 aa, Homo sapiens
RTRVPQFSFLDIFPKV

SEQ ID NO: 899 - protein, 18 aa, Homo sapiens
RKQPPSDAALTMLSFIKS

SEQ ID NO: 900 - protein, 12 aa, Homo sapiens
RETVQEFDLEKI

SEQ ID NO: 901 - protein, 14 aa, Homo sapiens
RSSLTLATAINQRG

SEQ ID NO: 902 - protein, 23 aa, Homo sapiens
RLLLDEITRAQDLFLDGVPLRKT

SEQ ID NO: 903 - protein, 14 aa, Homo sapiens
RLHKEPFGEISSRY

SEQ ID NO: 904 - protein, 15 aa, Homo sapiens
KVHGGTTADMIYSRV

SEQ ID NO: 905 - protein, 23 aa, Homo sapiens
KRGPAAIGLGPVIGIVMAEALRK

SEQ ID NO: 906 - protein, 14 aa, Homo sapiens
RRLLNFDTELSTKE

SEQ ID NO: 907 - protein, 10 aa, Homo sapiens
RYLWQHLKKH

SEQ ID NO: 908 - protein, 19 aa, Homo sapiens
KETSELGGSDVSILDTTRL

SEQ ID NO: 909 - protein, 18 aa, Homo sapiens
RKQPPSDAALTMLSFIKS

SEQ ID NO: 910 - protein, 16 aa, Homo sapiens
KMQLNVKNVPLKTIRL

SEQ ID NO: 911 - protein, 11 aa, Homo sapiens
RLESAGLGYRV

SEQ ID NO: 912 - protein, 14 aa, Homo sapiens
RVKWPNDLYLQDRK

SEQ ID NO: 913 - protein, 21 aa, Homo sapiens
RTADNFDDILKHLLTLADVKH

SEQ ID NO: 914 - protein, 14 aa, Homo sapiens
RRLLNFDTELSTKE

SEQ ID NO: 915 - protein, 25 aa, Homo sapiens
KQGALLLEQDGVIKPWMGGEISLRS

SEQ ID NO: 916 - protein, 24 aa, Homo sapiens
RNFSGKDDIQALDIFLANLPEAKC

SEQ ID NO: 917 - protein, 23 aa, Homo sapiens
RLLLDEITRAQDLFLDGVPLRKT

SEQ ID NO: 918 - protein, 16 aa, Homo sapiens
RTRVPQFSFLDIFPKV

SEQ ID NO: 919 - protein, 15 aa, Homo sapiens
RVKWPNDLYLQDRKL

SEQ ID NO: 920 - protein, 29 aa, Homo sapiens
RGIDKQGALLLEQDGVIKPWMGGEISLRS

SEQ ID NO: 921 - protein, 17 aa, Homo sapiens
KVGFVGISNWALDPAKM

SEQ ID NO: 922 - protein, 15 aa, Homo sapiens
RAQDLFLDGVPLRKT

SEQ ID NO: 923 - protein, 15 aa, Homo sapiens
KVHGGTTADMIYSRV

SEQ ID NO: 924 - protein, 14 aa, Homo sapiens
RRLLQEQHQLSSRR

SEQ ID NO: 925 - protein, 12 aa, Homo sapiens
RITVFLSTWNKL

SEQ ID NO: 926 - protein, 15 aa, Homo sapiens
KHLIQVDFGVLAVRH

SEQ ID NO: 927 - protein, 18 aa, Homo sapiens
REPANEASVEYLQEVARI

SEQ ID NO: 928 - protein, 19 aa, Homo sapiens
RLSQAFIDLHSAGNMLFRT

SEQ ID NO: 929 - protein, 18 aa, Homo sapiens
RAADFLSEPEGGPEMAKE

SEQ ID NO: 930 - protein, 12 aa, Homo sapiens
REEDLAPFSLRK

SEQ ID NO: 931 - protein, 14 aa, Homo sapiens
RDWGVDVFTVPGKG

SEQ ID NO: 932 - protein, 24 aa, Homo sapiens
KDLQQYVSVVVLDEVGLAEDSPKM

SEQ ID NO: 933 - protein, 17 aa, Homo sapiens
KEIAAVISPELEHLDKT

SEQ ID NO: 934 - protein, 29 aa, Homo sapiens
KQILGQLDGGSVAVLPVVDSTNQYLLDRI

SEQ ID NO: 935 - protein, 14 aa, Homo sapiens
RLHKEPFGEISSRY

SEQ ID NO: 936 - protein, 23 aa, Homo sapiens
KTSAYSRNDELNHLEEEGRFLKA

SEQ ID NO: 937 - protein, 37 aa, Homo sapiens; identical to SEQ ID NO: 408

SEQ ID NO: 938 - protein, 12 aa, Homo sapiens
RFFPKPYDDSRL

SEQ ID NO: 939 - protein, 39 aa, Homo sapiens; identical to SEQ ID NO: 496

SEQ ID NO: 940 - protein, 30 aa, Homo sapiens
KQNIFGPSQKVPGGEQEDAESRYLLVLTKN

SEQ ID NO: 941 - protein, 29 aa, Homo sapiens
KNLAFSPATMAHAFLPTMPEDLLAQARRW

SEQ ID NO: 942 - protein, 15 aa, Homo sapiens
RVKWPNDLYLQDRKL

SEQ ID NO: 943 - protein, 14 aa, Homo sapiens
RHAIFTEITTFSRL

SEQ ID NO: 944 - protein, 29 aa, Homo sapiens
RGIDKQGALLLEQDGVIKPWMGGEISLRS

SEQ ID NO: 945 - protein, 23 aa, Homo sapiens
RLSVFLKKQEESQFHPLEWLARE

SEQ ID NO: 946 - protein, 16 aa, Homo sapiens
RETLDQINQELIQAKK

SEQ ID NO: 947 - protein, 18 aa, Homo sapiens
RILTIYPQVLHSLMEARW

SEQ ID NO: 948 - protein, 36 aa, Homo sapiens; identical to SEQ ID NO: 745

SEQ ID NO: 949 - protein, 16 aa, Homo sapiens
REQMLDTSSLLQFMRE

SEQ ID NO: 950 - protein, 16 aa, Homo sapiens
KGYSLPEPIPLLNAKQ

SEQ ID NO: 951 - protein, 13 aa, Homo sapiens
KILANVTEDAKRL

SEQ ID NO: 952 - protein, 30 aa, Homo sapiens; identical to SEQ ID NO: 940

SEQ ID NO: 953 - protein, 29 aa, Homo sapiens
RGIDKQGALLLEQDGVIKPWMGGEISLRS

SEQ ID NO: 954 - protein, 56 aa, Homo sapiens; identical to SEQ ID NO: 22

SEQ ID NO: 955 - protein, 14 aa, Homo sapiens
RYLVYGDEYKALRD

SEQ ID NO: 956 - protein, 11 aa, Homo sapiens
KHVVPLPDGKS

SEQ ID NO: 957 - protein, 31 aa, Homo sapiens
KNYVALQILQQTFFEGDQQPEIIFGSGFPKD

SEQ ID NO: 958 - protein, 17 aa, Homo sapiens
RALTEELHQKVSEEAKS

SEQ ID NO: 959 - protein, 38 aa, Homo sapiens
KVFVTPQAPLEAIQAYLAGHYRVPKQTLSAAAVFNDRL

SEQ ID NO: 960 - protein, 14 aa, Homo sapiens
RNDELNHLEEEGRF

SEQ ID NO: 961 - protein, 29 aa, Homo sapiens
RFQQGKDLQQYVSVVVLDEVGLAEDSPKM

SEQ ID NO: 962 - protein, 19 aa, Homo sapiens
KETSELGGSDVSILDTTRL

SEQ ID NO: 963 - protein, 22 aa, Homo sapiens
RAPKPTLLWLQQFDTEYSFLKE

SEQ ID NO: 964 - protein, 34 aa, Homo sapiens; identical to SEQ ID NO: 67

SEQ ID NO: 965 - protein, 14 aa, Homo sapiens
KQTLSAAAVFNDRL

SEQ ID NO: 966 - protein, 15 aa, Homo sapiens
RHDWNYEHLFMDIKN

SEQ ID NO: 967 - protein, 16 aa, Homo sapiens
KGYSLPEPIPLLNAKQ

SEQ ID NO: 968 - protein, 13 aa, Homo sapiens
RLLNFDTELSTKE

SEQ ID NO: 969 - protein, 16 aa, Homo sapiens
RETLDQINQELIQAKK

SEQ ID NO: 970 - protein, 19 aa, Homo sapiens
RYLVYGDEYKALRDAVAKA

SEQ ID NO: 971 - protein, 12 aa, Homo sapiens
KTHGPFEAVMRT

SEQ ID NO: 972 - protein, 13 aa, Homo sapiens
KFGIVLSAVITKS

SEQ ID NO: 973 - protein, 15 aa, Homo sapiens
RWEKLDNFINRPVKL

SEQ ID NO: 974 - protein, 22 aa, Homo sapiens
RVMEELPLMLLSEFSLVDKLRI

SEQ ID NO: 975 - protein, 14 aa, Homo sapiens
RVPQFSFLDIFPKV

SEQ ID NO: 976 - protein, 29 aa, Homo sapiens
RGIDKQGALLLEQDGVIKPWMGGEISLRS

SEQ ID NO: 977 - protein, 14 aa, Homo sapiens
RNDELNHLEEEGRF

SEQ ID NO: 978 - protein, 17 aa, Homo sapiens
RNDELNHLEEEGRFLKA

SEQ ID NO: 979 - protein, 25 aa, Homo sapiens
RLQHVTISQLFAPGDLPELGLEHRA

SEQ ID NO: 980 - protein, 29 aa, Homo sapiens
RGIDKQGALLLEQDGVIKPWMGGEISLRS

SEQ ID NO: 981 - protein, 11 aa, Homo sapiens
KLYIQQIVQRL

SEQ ID NO: 982 - protein, 15 aa, Homo sapiens
REYSLEEVKELLNKL

SEQ ID NO: 983 - protein, 15 aa, Homo sapiens
KLIIGDKEIFGISRG

SEQ ID NO: 984 - protein, 12 aa, Homo sapiens
RDLYQGLLLQRV

SEQ ID NO: 985 - protein, 29 aa, Homo sapiens
RGIDKQGALLLEQDGVIKPWMGGEISLRS

SEQ ID NO: 986 - protein, 14 aa, Homo sapiens
RSAEKLQLPPLERL

SEQ ID NO: 987 - protein, 13 aa, Homo sapiens
RLLNFDTELSTKE

SEQ ID NO: 988 - protein, 22 aa, Homo sapiens
KVGKETSELGGSDVSILDTTRL

SEQ ID NO: 989 - protein, 10 aa, Homo sapiens
REELLLLKKE

SEQ ID NO: 990 - protein, 15 aa, Homo sapiens
RGSPNETELIESAKG

SEQ ID NO: 991 - protein, 16 aa, Homo sapiens
KTLPTMNNLISQDKRI

SEQ ID NO: 992 - protein, 17 aa, Homo sapiens
RNTLKPSPQAWLQLVKN

SEQ ID NO: 993 - protein, 29 aa, Homo sapiens
RGIDKQGALLLEQDGVIKPWMGGEISLRS

SEQ ID NO: 994 - protein, 25 aa, Homo sapiens
KSSLLGSGDWHQYYDIVYMKPHGRL

SEQ ID NO: 995 - protein, 20 aa, Homo sapiens
RGREPANEASVEYLQEVARI

SEQ ID NO: 996 - protein, 14 aa, Homo sapiens
KGLEDSVAKTFEKC

SEQ ID NO: 997 - protein, 10 aa, Homo sapiens
REELLLLKKE

SEQ ID NO: 998 - protein, 11 aa, Homo sapiens
KLLQDISEARC

SEQ ID NO: 999 - protein, 12 aa, Homo sapiens
RSTLMVSDVTRL

SEQ ID NO: 1000 - protein, 29 aa, Homo sapiens
RGIDKQGALLLEQDGVIKPWMGGEISLRS

SEQ ID NO: 1001 - protein, 11 aa, Homo sapiens
RLESAGLGYRV

SEQ ID NO: 1002 - protein, 15 aa, Homo sapiens
RHDWNYEHLFMDIKN

SEQ ID NO: 1003 - protein, 21 aa, Homo sapiens
RRVMEELPLMLLSEFSLVDKL

SEQ ID NO: 1004 - protein, 14 aa, Homo sapiens
RLSLKGIPTLVYRH

SEQ ID NO: 1005 - protein, 23 aa, Homo sapiens
RQRHNSFADFLQAHLHTADLERH

SEQ ID NO: 1006 - protein, 20 aa, Homo sapiens
KVGFVGISNWALDPAKMNRG

SEQ ID NO: 1007 - protein, 19 aa, Homo sapiens
KASNRKPSPQDIAQAVLRN

SEQ ID NO: 1008 - protein, 36 aa, Homo sapiens; identical to SEQ ID NO: 745

SEQ ID NO: 1009 - protein, 12 aa, Homo sapiens
RLIDPQVDESRV

SEQ ID NO: 1010 - protein, 14 aa, Homo sapiens
RVPFNVDFDKLPRH

SEQ ID NO: 1011 - protein, 17 aa, Homo sapiens
RNDELNHLEEEGRFLKA

SEQ ID NO: 1012 - protein, 18 aa, Homo sapiens
RATHYHLSSQVQEMAGKI

SEQ ID NO: 1013 - protein, 15 aa, Homo sapiens
KLIIGDKEIFGISRG

SEQ ID NO: 1014 - protein, 35 aa, Homo sapiens
RNNWEKEIAAVISPELEHLDKTLPTMNNLISQDKR

SEQ ID NO: 1015 - protein, 26 aa, Homo sapiens
KVFVTPQAPLEAIQAYLAGHYRVPKQ

SEQ ID NO: 1016 - protein, 34 aa, Homo sapiens; identical to SEQ ID NO: 40

SEQ ID NO: 1017 - protein, 17 aa, Homo sapiens
RNDELNHLEEEGRFLKA

SEQ ID NO: 1018 - protein, 17 aa, Homo sapiens
RALTEELHQKVSEEAKS

SEQ ID NO: 1019 - protein, 20 aa, Homo sapiens
RDLVKQFQNVQQVEYSSIRG

SEQ ID NO: 1020 - protein, 21 aa, Homo sapiens
KHTIALWQFLSAHKSEQLLRL

SEQ ID NO: 1021 - protein, 14 aa, Homo sapiens
RHAIFTEITTFSRL

SEQ ID NO: 1022 - protein, 14 aa, Homo sapiens
RVKWPNDLYLQDRK

SEQ ID NO: 1023 - protein, 15 aa, Homo sapiens
RVKWPNDLYLQDRKL

SEQ ID NO: 1024 - protein, 20 aa, Homo sapiens
RDLVKQFQNVQQVEYSSIRG

SEQ ID NO: 1025 - protein, 16 aa, Homo sapiens
KGYSLPEPIPLLNAKQ

SEQ ID NO: 1026 - protein, 29 aa, Homo sapiens
RGIDKQGALLLEQDGVIKPWMGGEISLRS

SEQ ID NO: 1027 - protein, 20 aa, Homo sapiens
KTIVADAMQGPAAYSDLFRS

SEQ ID NO: 1028 - protein, 29 aa, Homo sapiens
RGIDKQGALLLEQDGVIKPWMGGEISLRS

SEQ ID NO: 1029 - protein, 13 aa, Homo sapiens
KALDKDQYLPRKL

SEQ ID NO: 1030 - protein, 14 aa, Homo sapiens
RLHKEPFGEISSRY

SEQ ID NO: 1031 - protein, 14 aa, Homo sapiens
RLHKEPFGEISSRY

SEQ ID NO: 1032 - protein, 22 aa, Homo sapiens
RAALELFEQEGLAPYLPRWEKL

SEQ ID NO: 1033 - protein, 14 aa, Homo sapiens
RRLLNFDTELSTKE

SEQ ID NO: 1034 - protein, 14 aa, Homo sapiens
RSSLTLATAINQRG

SEQ ID NO: 1035 - protein, 23 aa, Homo sapiens
RQRHNSFADFLQAHLHTADLERH

SEQ ID NO: 1036 - protein, 23 aa, Homo sapiens
RGMEFVQGLSKPGRPHQWVFPKD

SEQ ID NO: 1037 - protein, 34 aa, Homo sapiens; identical to SEQ ID NO: 67

SEQ ID NO: 1038 - protein, 17 aa, Homo sapiens
KKQEESQFHPLEWLARE

SEQ ID NO: 1039 - protein, 16 aa, Homo sapiens
KQEESQFHPLEWLARE

SEQ ID NO: 1040 - protein, 13 aa, Homo sapiens
KILANVTEDAKRL

SEQ ID NO: 1041 - protein, 29 aa, Homo sapiens
RGIDKQGALLLEQDGVIKPWMGGEISLRS

SEQ ID NO: 1042 - protein, 23 aa, Homo sapiens
RQRHNSFADFLQAHLHTADLERH

SEQ ID NO: 1043 - protein, 20 aa, Homo sapiens
KMLGHSADETIGVVHLVLRR

SEQ ID NO: 1044 - protein, 21 aa, Homo sapiens
RHNSFADFLQAHLHTADLERH

SEQ ID NO: 1045 - protein, 14 aa, Homo sapiens
RLSLKGIPTLVYRH

SEQ ID NO: 1046 - protein, 15 aa, Homo sapiens
RAQDLFLDGVPLRKT

SEQ ID NO: 1047 - protein, 19 aa, Homo sapiens
RVPELQGLVTEHVFLLDKC

SEQ ID NO: 1048 - protein, 56 aa, Homo sapiens; identical to SEQ ID NO: 22

SEQ ID NO: 1049 - protein, 14 aa, Homo sapiens
RMKQPPATTPPFKT

SEQ ID NO: 1050 - protein, 21 aa, Homo sapiens
KQFQNVQQVEYSSIRGFLSKH

SEQ ID NO: 1051 - protein, 16 aa, Homo sapiens
RTRVPQFSFLDIFPKV

SEQ ID NO: 1052 - protein, 29 aa, Homo sapiens
RGIDKQGALLLEQDGVIKPWMGGEISLRS

SEQ ID NO: 1053 - protein, 18 aa, Homo sapiens
KIIYGDPVTFLPHLPRKS

SEQ ID NO: 1054 - protein, 14 aa, Homo sapiens
RVKWPNDLYLQDRK

SEQ ID NO: 1055 - protein, 31 aa, Homo sapiens; identical to SEQ ID NO: 27

SEQ ID NO: 1056 - protein, 29 aa, Homo sapiens
RGIDKQGALLLEQDGVIKPWMGGEISLRS

SEQ ID NO: 1057 - protein, 29 aa, Homo sapiens
KQILGQLDGGSVAVLPVVDSTNQYLLDRI

SEQ ID NO: 1058 - protein, 20 aa, Homo sapiens
KDVVKQQGLRQDHPGQMDRY

SEQ ID NO: 1059 - protein, 23 aa, Homo sapiens
KRGPAAIGLGPVIGIVMAEALRK

SEQ ID NO: 1060 - protein, 11 aa, Homo sapiens
KHLLTLADVKH

SEQ ID NO: 1061 - protein, 29 aa, Homo sapiens
KQILGQLDGGSVAVLPVVDSTNQYLLDRI

SEQ ID NO: 1062 - protein, 29 aa, Homo sapiens
KQILGQLDGGSVAVLPVVDSTNQYLLDRI

SEQ ID NO: 1063 - protein, 29 aa, Homo sapiens
RGIDKQGALLLEQDGVIKPWMGGEISLRS

SEQ ID NO: 1064 - protein, 38 aa, Homo sapiens; identical to SEQ ID NO: 959

SEQ ID NO: 1065 - protein, 15 aa, Homo sapiens
KHLIQVDFGVLAVRH

SEQ ID NO: 1066 - protein, 38 aa, Homo sapiens; identical to SEQ ID NO: 169

SEQ ID NO: 1067 - protein, 25 aa, Homo sapiens
RRVEESVVNQGWITLQEAGINLDRN

SEQ ID NO: 1068 - protein, 24 aa, Homo sapiens
RDLYQGLLLQRVPFNVDFDKLPRH

SEQ ID NO: 1069 - protein, 20 aa, Homo sapiens
KVGFVGISNWALDPAKMNRG

SEQ ID NO: 1070 - protein, 21 aa, Homo sapiens
RTADNFDDILKHLLTLADVKH

SEQ ID NO: 1071 - protein, 12 aa, Homo sapiens
RDSHIFQLFWRE

SEQ ID NO: 1072 - protein, 29 aa, Homo sapiens
KQILGQLDGGSVAVLPVVDSTNQYLLDRI

SEQ ID NO: 1073 - protein, 16 aa, Homo sapiens
RTRVPQFSFLDIFPKV

SEQ ID NO: 1074 - protein, 13 aa, Homo sapiens
RLLSLVDSAGQRD

SEQ ID NO: 1075 - protein, 31 aa, Homo sapiens; identical to SEQ ID NO: 176

SEQ ID NO: 1076 - protein, 24 aa, Homo sapiens
RDLYQGLLLQRVPFNVDFDKLPRH

SEQ ID NO: 1077 - protein, 17 aa, Homo sapiens
RETLDQINQELIQAKKL

SEQ ID NO: 1078 - protein, 42 aa, Homo sapiens; identical to SEQ ID NO: 57

SEQ ID NO: 1079 - protein, 35 aa, Homo sapiens; identical to SEQ ID NO: 600

SEQ ID NO: 1080 - protein, 21 aa, Homo sapiens
KMLGHSADETIGVVHLVLRRL

SEQ ID NO: 1081 - protein, 11 aa, Homo sapiens
RLESAGLGYRV

SEQ ID NO: 1082 - protein, 20 aa, Homo sapiens
RVMEELPLMLLSEFSLVDKL

SEQ ID NO: 1083 - protein, 21 aa, Homo sapiens
RTADNFDDILKHLLTLADVKH

SEQ ID NO: 1084 - protein, 37 aa, Homo sapiens; identical to SEQ ID NO: 408

SEQ ID NO: 1085 - protein, 14 aa, Homo sapiens
RLHKEPFGEISSRY

SEQ ID NO: 1086 - protein, 15 aa, Homo sapiens
RVKWPNDLYLQDRKL

SEQ ID NO: 1087 - protein, 29 aa, Homo sapiens
RGIDKQGALLLEQDGVIKPWMGGEISLRS

SEQ ID NO: 1088 - protein, 21 aa, Homo sapiens
KHMVTMDGVREEDLAPFSLRK

SEQ ID NO: 1089 - protein, 12 aa, Homo sapiens
RDLYQGLLLQRV

SEQ ID NO: 1090 - protein, 18 aa, Homo sapiens
RENSDVKTHGPFEAVMRT

SEQ ID NO: 1091 - protein, 24 aa, Homo sapiens
RDLYQGLLLQRVPFNVDFDKLPRH

SEQ ID NO: 1092 - protein, 16 aa, Homo sapiens
RFATSLVDNSVPLLRA

SEQ ID NO: 1093 - protein, 12 aa, Homo sapiens
KYVDLGLGTHRV

SEQ ID NO: 1094 - protein, 26 aa, Homo sapiens
KIKDYLEELWVQAQYITDAEGLPKKF

SEQ ID NO: 1095 - protein, 25 aa, Homo sapiens
RLVEIQFPAEHGWKESLLGDMEWRL

SEQ ID NO: 1096 - protein, 14 aa, Homo sapiens
RLHKEPFGEISSRY

SEQ ID NO: 1097 - protein, 29 aa, Homo sapiens
RGIDKQGALLLEQDGVIKPWMGGEISLRS

SEQ ID NO: 1098 - protein, 28 aa, Homo sapiens
KNLAFSPATMAHAFLPTMPEDLLAQARR

SEQ ID NO: 1099 - protein, 29 aa, Homo sapiens
KNLAFSPATMAHAFLPTMPEDLLAQARRW

SEQ ID NO: 1100 - protein, 18 aa, Homo sapiens
RENSDVKTHGPFEAVMRT

SEQ ID NO: 1101 - protein, 12 aa, Homo sapiens
KKLLQDISEARC

SEQ ID NO: 1102 - protein, 20 aa, Homo sapiens
KTIVADAMQGPAAYSDLFRS

SEQ ID NO: 1103 - protein, 17 aa, Homo sapiens
RVLGALLPFLDAQYQKV

SEQ ID NO: 1104 - protein, 29 aa, Homo sapiens
RFQQGKDLQQYVSVVVLDEVGLAEDSPKM

SEQ ID NO: 1105 - protein, 21 aa, Homo sapiens
RGIFVSRGSPNETELIESAKG

SEQ ID NO: 1106 - protein, 19 aa, Homo sapiens
KETSELGGSDVSILDTTRL

SEQ ID NO: 1107 - protein, 20 aa, Homo sapiens
KTIVADAMQGPAAYSDLFRS

SEQ ID NO: 1108 - protein, 16 aa, Homo sapiens
RTRVPQFSFLDIFPKV

SEQ ID NO: 1109 - protein, 28 aa, Homo sapiens
RDWGVDVFTVPGKGYSLPEPIPLLNAKQ

SEQ ID NO: 1110 - protein, 15 aa, Homo sapiens
RAQDLFLDGVPLRKT

SEQ ID NO: 1111 - protein, 17 aa, Homo sapiens
RRLLNFDTELSTKEMRN

SEQ ID NO: 1112 - protein, 29 aa, Homo sapiens
KQILGQLDGGSVAVLPVVDSTNQYLLDRI

SEQ ID NO: 1113 - protein, 16 aa, Homo sapiens
REQMLDTSSLLQFMRE

SEQ ID NO: 1114 - protein, 29 aa, Homo sapiens
RGIDKQGALLLEQDGVIKPWMGGEISLRS

SEQ ID NO: 1115 - protein, 14 aa, Homo sapiens
RLHKEPFGEISSRY

SEQ ID NO: 1116 - protein, 24 aa, Homo sapiens
RDLYQGLLLQRVPFNVDFDKLPRH

SEQ ID NO: 1117 - protein, 56 aa, Homo sapiens; identical to SEQ ID NO: 22

SEQ ID NO: 1118 - protein, 21 aa, Homo sapiens
RGLSQEGTGPPTSAGEGHSRT

SEQ ID NO: 1119 - protein, 25 aa, Homo sapiens
KVGKETSELGGSDVSILDTTRLLRS

SEQ ID NO: 1120 - protein, 14 aa, Homo sapiens
RRLLNFDTELSTKE

SEQ ID NO: 1121 - protein, 13 aa, Homo sapiens
REEDLAPFSLRKR

SEQ ID NO: 1122 - protein, 17 aa, Homo sapiens
RETLDQINQELIQAKKL

SEQ ID NO: 1123 - protein, 56 aa, Homo sapiens; identical to SEQ ID NO: 22

SEQ ID NO: 1124 - protein, 14 aa, Homo sapiens
RSSLTLATAINQRG

SEQ ID NO: 1125 - protein, 21 aa, Homo sapiens
RGLSQEGTGPPTSAGEGHSRT

SEQ ID NO: 1126 - protein, 59 aa, Homo sapiens; identical to SEQ ID NO: 88

SEQ ID NO: 1127 - protein, 15 aa, Homo sapiens
RAQDLFLDGVPLRKT

SEQ ID NO: 1128 - protein, 16 aa, Homo sapiens
RFATSLVDNSVPLLRA

SEQ ID NO: 1129 - protein, 18 aa, Homo sapiens
RENSDVKTHGPFEAVMRT

SEQ ID NO: 1130 - protein, 23 aa, Homo sapiens
RQRHNSFADFLQAHLHTADLERH

SEQ ID NO: 1131 - protein, 14 aa, Homo sapiens
RSAEKLQLPPLERL

SEQ ID NO: 1132 - protein, 59 aa, Homo sapiens; identical to SEQ ID NO: 88

SEQ ID NO: 1133 - protein, 34 aa, Homo sapiens; identical to SEQ ID NO: 193

SEQ ID NO: 1134 - protein, 71 aa, Homo sapiens; identical to SEQ ID NO: 21

SEQ ID NO: 1135 - protein, 29 aa, Homo sapiens
RGIDKQGALLLEQDGVIKPWMGGEISLRS

SEQ ID NO: 1136 - protein, 28 aa, Homo sapiens
KNLAFSPATMAHAFLPTMPEDLLAQARR

SEQ ID NO: 1137 - protein, 21 aa, Homo sapiens
KHTIALWQFLSAHKSEQLLRL

SEQ ID NO: 1138 - protein, 59 aa, Homo sapiens; identical to SEQ ID NO: 88

SEQ ID NO: 1139 - protein, 26 aa, Homo sapiens
RVHALPPSLIPLVWDFGQLSDVAEKL

SEQ ID NO: 1140 - protein, 29 aa, Homo sapiens
RGIDKQGALLLEQDGVIKPWMGGEISLRS

SEQ ID NO: 1141 - protein, 26 aa, Homo sapiens
KLIALLANGEFHSGEQLGETLGMSRA

SEQ ID NO: 1142 - protein, 29 aa, Homo sapiens
RGIDKQGALLLEQDGVIKPWMGGEISLRS

SEQ ID NO: 1143 - protein, 25 aa, Homo sapiens
RAPKPTLLWLQQFDTEYSFLKEVRN

SEQ ID NO: 1144 - protein, 33 aa, Homo sapiens; identical to SEQ ID NO: 19

SEQ ID NO: 1145 - protein, 17 aa, Homo sapiens
RALTEELHQKVSEEAKS

SEQ ID NO: 1146 - protein, 14 aa, Homo sapiens
RSLETNGEINLPKD

SEQ ID NO: 1147 - protein, 24 aa, Homo sapiens
KDLQQYVSVVVLDEVGLAEDSPKM

SEQ ID NO: 1148 - protein, 19 aa, Homo sapiens
RVPELQGLVTEHVFLLDKC

SEQ ID NO: 1149 - protein, 15 aa, Homo sapiens
KLIIGDKEIFGISRG

SEQ ID NO: 1150 - protein, 29 aa, Homo sapiens
RGIDKQGALLLEQDGVIKPWMGGEISLRS

SEQ ID NO: 1151 - protein, 34 aa, Homo sapiens; identical to SEQ ID NO: 67

SEQ ID NO: 1152 - protein, 15 aa, Homo sapiens
KLIIGDKEIFGISRG

SEQ ID NO: 1153 - protein, 21 aa, Homo sapiens
RGIFVSRGSPNETELIESAKG

SEQ ID NO: 1154 - protein, 29 aa, Homo sapiens
KQILGQLDGGSVAVLPVVDSTNQYLLDRI

SEQ ID NO: 1155 - protein, 18 aa, Homo sapiens
RENSDVKTHGPFEAVMRT

SEQ ID NO: 1156 - protein, 16 aa, Homo sapiens
KGYSLPEPIPLLNAKQ

SEQ ID NO: 1157 - protein, 31 aa, Homo sapiens; identical to SEQ ID NO: 27

SEQ ID NO: 1158 - protein, 18 aa, Homo sapiens
KGFLQQHILKDLEQLAKM

SEQ ID NO: 1159 - protein, 15 aa, Homo sapiens
RITVEYLQHIVEQKN

SEQ ID NO: 1160 - protein, 19 aa, Homo sapiens
RHSQDLSSKRLNDTVTVRL

SEQ ID NO: 1161 - protein, 16 aa, Homo sapiens
KGYSLPEPIPLLNAKQ

SEQ ID NO: 1162 - protein, 20 aa, Homo sapiens
KTIVADAMQGPAAYSDLFRS

SEQ ID NO: 1163 - protein, 35 aa, Homo sapiens; identical to SEQ ID NO: 600

SEQ ID NO: 1164 - protein, 14 aa, Homo sapiens
RVPFNVDFDKLPRH

SEQ ID NO: 1165 - protein, 44 aa, Homo sapiens; identical to SEQ ID NO: 34

SEQ ID NO: 1166 - protein, 23 aa, Homo sapiens
KQNIFGPSQKVPGGEQEDAESRY

SEQ ID NO: 1167 - protein, 25 aa, Homo sapiens
KLKAASEAPEEEVSLPWVHLAYQRF

SEQ ID NO: 1168 - protein, 17 aa, Homo sapiens
RRLLNFDTELSTKEMRN

SEQ ID NO: 1169 - protein, 29 aa, Homo sapiens
RGIDKQGALLLEQDGVIKPWMGGEISLRS

SEQ ID NO: 1170 - protein, 24 aa, Homo sapiens
RNFSGKDDIQALDIFLANLPEAKC

SEQ ID NO: 1171 - protein, 28 aa, Homo sapiens
KDLQQYVSVVVLDEVGLAEDSPKMPLKT

SEQ ID NO: 1172 - protein, 17 aa, Homo sapiens
KIIYGDPVTFLPHLPRK

SEQ ID NO: 1173 - protein, 23 aa, Homo sapiens
RLSAYSLGGFAAEWLSQEYFHRQ

SEQ ID NO: 1174 - protein, 29 aa, Homo sapiens
RGIDKQGALLLEQDGVIKPWMGGEISLRS

SEQ ID NO: 1175 - protein, 25 aa, Homo sapiens
KSSLLGSGDWHQYYDIVYMKPHGRL

SEQ ID NO: 1176 - protein, 14 aa, Homo sapiens
RVPQFSFLDIFPKV

SEQ ID NO: 1177 - protein, 14 aa, Homo sapiens
RSAEKLQLPPLERL

SEQ ID NO: 1178 - protein, 23 aa, Homo sapiens
RLLLDEITRAQDLFLDGVPLRKT

SEQ ID NO: 1179 - protein, 38 aa, Homo sapiens; identical to SEQ ID NO: 169

SEQ ID NO: 1180 - protein, 18 aa, Homo sapiens
KIIYGDPVTFLPHLPRKS

SEQ ID NO: 1181 - protein, 29 aa, Homo sapiens
RGIDKQGALLLEQDGVIKPWMGGEISLRS

SEQ ID NO: 1182 - protein, 19 aa, Homo sapiens
RVPELQGLVTEHVFLLDKC

SEQ ID NO: 1183 - protein, 16 aa, Homo sapiens
KMQLNVKNVPLKTIRL

SEQ ID NO: 1184 - protein, 18 aa, Homo sapiens
RATHYHLSSQVQEMAGKI

SEQ ID NO: 1185 - protein, 16 aa, Homo sapiens
RTEDAAQELLLPESKG

SEQ ID NO: 1186 - protein, 45 aa, Homo sapiens
KRWESEPHPYVFFNDDHTTMTFIGFHLQPNINGSVDAISHLTGKV

SEQ ID NO: 1187 - protein, 29 aa, Homo sapiens
RGIDKQGALLLEQDGVIKPWMGGEISLRS

SEQ ID NO: 1188 - protein, 20 aa, Homo sapiens
KVGFVGISNWALDPAKMNRG

SEQ ID NO: 1189 - protein, 14 aa, Homo sapiens
RAQDLFLDGVPLRK

SEQ ID NO: 1190 - protein, 18 aa, Homo sapiens
RVSMEETADRLGSIPLRQ

SEQ ID NO: 1191 - protein, 20 aa, Homo sapiens
RVMEELPLMLLSEFSLVDKL

SEQ ID NO: 1192 - protein, 24 aa, Homo sapiens
RDLYQGLLLQRVPFNVDFDKLPRH

SEQ ID NO: 1193 - protein, 29 aa, Homo sapiens
KQILGQLDGGSVAVLPVVDSTNQYLLDRI

SEQ ID NO: 1194 - protein, 18 aa, Homo sapiens
KTPQSQQSAYFLLTLFRE

SEQ ID NO: 1195 - protein, 18 aa, Homo sapiens
RILTIYPQVLHSLMEARW

SEQ ID NO: 1196 - protein, 28 aa, Homo sapiens
RDWGVDVFTVPGKGYSLPEPIPLLNAKQ

SEQ ID NO: 1197 - protein, 29 aa, Homo sapiens
RGIDKQGALLLEQDGVIKPWMGGEISLRS

SEQ ID NO: 1198 - protein, 21 aa, Homo sapiens
KMLGHSADETIGVVHLVLRRL

SEQ ID NO: 1199 - protein, 26 aa, Homo sapiens
KLIALLANGEFHSGEQLGETLGMSRA

SEQ ID NO: 1200 - protein, 26 aa, Homo sapiens
KLIALLANGEFHSGEQLGETLGMSRA

SEQ ID NO: 1201 - protein, 18 aa, Homo sapiens
KIIYGDPVTFLPHLPRKS

SEQ ID NO: 1202 - protein, 29 aa, Homo sapiens
KQILGQLDGGSVAVLPVVDSTNQYLLDRI

SEQ ID NO: 1203 - protein, 56 aa, Homo sapiens; identical to SEQ ID NO: 22

SEQ ID NO: 1204 - protein, 20 aa, Homo sapiens
KVGFVGISNWALDPAKMNRG

SEQ ID NO: 1205 - protein, 29 aa, Homo sapiens
RGIDKQGALLLEQDGVIKPWMGGEISLRS

SEQ ID NO: 1206 - protein, 18 aa, Homo sapiens
RILTIYPQVLHSLMEARW

SEQ ID NO: 1207 - protein, 29 aa, Homo sapiens
KQILGQLDGGSVAVLPVVDSTNQYLLDRI

SEQ ID NO: 1208 - protein, 14 aa, Homo sapiens
RLSLKGIPTLVYRH

SEQ ID NO: 1209 - protein, 14 aa, Homo sapiens
RSAEKLQLPPLERL

SEQ ID NO: 1210 - protein, 45 aa, Homo sapiens; identical to SEQ ID NO: 178

SEQ ID NO: 1211 - protein, 14 aa, Homo sapiens
RVPFNVDFDKLPRH

SEQ ID NO: 1212 - protein, 17 aa, Homo sapiens
KIIYGDPVTFLPHLPRK

SEQ ID NO: 1213 - protein, 71 aa, Homo sapiens; identical to SEQ ID NO: 21

SEQ ID NO: 1214 - protein, 25 aa, Homo sapiens
KIKDYLEELWVQAQYITDAEGLPKK

SEQ ID NO: 1215 - protein, 26 aa, Homo sapiens
KLIALLANGEFHSGEQLGETLGMSRA

SEQ ID NO: 1216 - protein, 16 aa, Homo sapiens
RTEDAAQELLLPESKG

SEQ ID NO: 1217 - protein, 23 aa, Homo sapiens
KTSAYSRNDELNHLEEEGRFLKA

SEQ ID NO: 1218 - protein, 14 aa, Homo sapiens
RSAEKLQLPPLERL

SEQ ID NO: 1219 - protein, 14 aa, Homo sapiens
RLHKEPFGEISSRY

SEQ ID NO: 1220 - protein, 22 aa, Homo sapiens
KVVGDLLSGTILVGQLELIIKH

SEQ ID NO: 1221 - protein, 20 aa, Homo sapiens
KVGFVGISNWALDPAKMNRG

SEQ ID NO: 1222 - protein, 14 aa, Homo sapiens
RLHKEPFGEISSRY

SEQ ID NO: 1223 - protein, 31 aa, Homo sapiens; identical to SEQ ID NO: 176

SEQ ID NO: 1224 - protein, 25 aa, Homo sapiens
RLQHVTISQLFAPGDLPELGLEHRA

SEQ ID NO: 1225 - protein, 20 aa, Homo sapiens
RDLVKQFQNVQQVEYSSIRG

SEQ ID NO: 1226 - protein, 23 aa, Homo sapiens
RDETGNNSVQTVFQGTLAATKRW

SEQ ID NO: 1227 - protein, 38 aa, Homo sapiens; identical to SEQ ID NO: 169

SEQ ID NO: 1228 - protein, 56 aa, Homo sapiens; identical to SEQ ID NO: 22

SEQ ID NO: 1229 - protein, 56 aa, Homo sapiens; identical to SEQ ID NO: 22

SEQ ID NO: 1230 - protein, 17 aa, Homo sapiens
KVGFVGISNWALDPAKM

SEQ ID NO: 1231 - protein, 29 aa, Homo sapiens
RGIDKQGALLLEQDGVIKPWMGGEISLRS

SEQ ID NO: 1232 - protein, 20 aa, Homo sapiens
RAADFLSEPEGGPEMAKEKQ

SEQ ID NO: 1233 - protein, 20 aa, Homo sapiens
KTIVADAMQGPAAYSDLFRS

SEQ ID NO: 1234 - protein, 35 aa, Homo sapiens
RVHALPPSLIPLVWDFGQLSDVAEKLYIQQIVQRL

SEQ ID NO: 1235 - protein, 29 aa, Homo sapiens
RGIDKQGALLLEQDGVIKPWMGGEISLRS

SEQ ID NO: 1236 - protein, 30 aa, Homo sapiens; identical to SEQ ID NO: 940

SEQ ID NO: 1237 - protein, 26 aa, Homo sapiens
KLIALLANGEFHSGEQLGETLGMSRA

SEQ ID NO: 1238 - protein, 20 aa, Homo sapiens
KVGFVGISNWALDPAKMNRG

SEQ ID NO: 1239 - protein, 29 aa, Homo sapiens
RGIDKQGALLLEQDGVIKPWMGGEISLRS

SEQ ID NO: 1240 - protein, 29 aa, Homo sapiens
KQILGQLDGGSVAVLPVVDSTNQYLLDRI

SEQ ID NO: 1241 - protein, 17 aa, Homo sapiens
RNTLKPSPQAWLQLVKN

SEQ ID NO: 1242 - protein, 35 aa, Homo sapiens
RSTLMVSDVTRLQHVTISQLFAPGDLPELGLEHRA

SEQ ID NO: 1243 - protein, 29 aa, Homo sapiens
RFQQGKDLQQYVSVVVLDEVGLAEDSPKM

SEQ ID NO: 1244 - protein, 27 aa, Homo sapiens
RLIDPQVDESRVLGALLPFLDAQYQKV

SEQ ID NO: 1245 - protein, 26 aa, Homo sapiens
RVHALPPSLIPLVWDFGQLSDVAEKL

SEQ ID NO: 1246 - protein, 13 aa, Homo sapiens
RLHNEIVYAVEKL

SEQ ID NO: 1247 - protein, 24 aa, Homo sapiens
RNFSGKDDIQALDIFLANLPEAKC

SEQ ID NO: 1248 - protein, 15 aa, Homo sapiens
RITVEYLQHIVEQKN

SEQ ID NO: 1249 - protein, 19 aa, Homo sapiens
KETSELGGSDVSILDTTRL

SEQ ID NO: 1250 - protein, 21 aa, Homo sapiens
RGLSQEGTGPPTSAGEGHSRT

SEQ ID NO: 1251 - protein, 29 aa, Homo sapiens
RGIDKQGALLLEQDGVIKPWMGGEISLRS

SEQ ID NO: 1252 - protein, 29 aa, Homo sapiens
RGIDKQGALLLEQDGVIKPWMGGEISLRS

SEQ ID NO: 1253 - protein, 18 aa, Homo sapiens
KGFLQQHILKDLEQLAKM

SEQ ID NO: 1254 - protein, 36 aa, Homo sapiens; identical to SEQ ID NO: 745

SEQ ID NO: 1255 - protein, 15 aa, Homo sapiens
KLIIGDKEIFGISRG

SEQ ID NO: 1256 - protein, 22 aa, Homo sapiens
RLLLDEITRAQDLFLDGVPLRK

SEQ ID NO: 1257 - protein, 22 aa, Homo sapiens
KVVGDLLSGTILVGQLELIIKH

SEQ ID NO: 1258 - protein, 16 aa, Homo sapiens
RFATSLVDNSVPLLRA

SEQ ID NO: 1259 - protein, 22 aa, Homo sapiens
RVMEELPLMLLSEFSLVDKLRI

SEQ ID NO: 1260 - protein, 28 aa, Homo sapiens
KNLAFSPATMAHAFLPTMPEDLLAQARR

SEQ ID NO: 1261 - protein, 17 aa, Homo sapiens
KVGFVGISNWALDPAKM

SEQ ID NO: 1262 - protein, 20 aa, Homo sapiens
KTIVADAMQGPAAYSDLFRS

SEQ ID NO: 1263 - protein, 23 aa, Homo sapiens
RLSAYSLGGFAAEWLSQEYFHRQ

SEQ ID NO: 1264 - protein, 24 aa, Homo sapiens
RDLYQGLLLQRVPFNVDFDKLPRH

SEQ ID NO: 1265 - protein, 18 aa, Homo sapiens
RAADFLSEPEGGPEMAKE

SEQ ID NO: 1266 - protein, 17 aa, Homo sapiens
RNTLKPSPQAWLQLVKN

SEQ ID NO: 1267 - protein, 36 aa, Homo sapiens; identical to SEQ ID NO: 745

SEQ ID NO: 1268 - protein, 36 aa, Homo sapiens; identical to SEQ ID NO: 745

SEQ ID NO: 1269 - protein, 23 aa, Homo sapiens
KDNAPPEKEVIESLLSLLFVQKG

SEQ ID NO: 1270 - protein, 15 aa, Homo sapiens
RAQDLFLDGVPLRKT

SEQ ID NO: 1271 - protein, 29 aa, Homo sapiens
RGIDKQGALLLEQDGVIKPWMGGEISLRS

SEQ ID NO: 1272 - protein, 15 aa, Homo sapiens
RGSPNETELIESAKG

SEQ ID NO: 1273 - protein, 23 aa, Homo sapiens
KAASEAPEEEVSLPWVHLAYQRF

SEQ ID NO: 1274 - protein, 17 aa, Homo sapiens
RALTEELHQKVSEEAKS

SEQ ID NO: 1275 - protein, 20 aa, Homo sapiens
KTIVADAMQGPAAYSDLFRS

SEQ ID NO: 1276 - protein, 35 aa, Homo sapiens; identical to SEQ ID NO: 600

SEQ ID NO: 1277 - protein, 34 aa, Homo sapiens; identical to SEQ ID NO: 857

SEQ ID NO: 1278 - protein, 20 aa, Homo sapiens
KVGFVGISNWALDPAKMNRG

SEQ ID NO: 1279 - protein, 35 aa, Homo sapiens; identical to SEQ ID NO: 600

SEQ ID NO: 1280 - protein, 20 aa, Homo sapiens
RAADFLSEPEGGPEMAKEKQ

SEQ ID NO: 1281 - protein, 35 aa, Homo sapiens; identical to SEQ ID NO: 1014

SEQ ID NO: 1282 - protein, 14 aa, Homo sapiens
KQTLSAAAVFNDRL

SEQ ID NO: 1283 - protein, 21 aa, Homo sapiens
RTADNFDDILKHLLTLADVKH

SEQ ID NO: 1284 - protein, 20 aa, Homo sapiens
KTIVADAMQGPAAYSDLFRS

SEQ ID NO: 1285 - protein, 29 aa, Homo sapiens
RGIDKQGALLLEQDGVIKPWMGGEISLRS

SEQ ID NO: 1286 - protein, 14 aa, Homo sapiens
RSSLTLATAINQRG

SEQ ID NO: 1287 - protein, 15 aa, Homo sapiens
RGSPNETELIESAKG

SEQ ID NO: 1288 - protein, 15 aa, Homo sapiens
KLIIGDKEIFGISRG

SEQ ID NO: 1289 - protein, 38 aa, Homo sapiens; identical to SEQ ID NO: 169

SEQ ID NO: 1290 - protein, 34 aa, Homo sapiens; identical to SEQ ID NO: 67

SEQ ID NO: 1291 - protein, 56 aa, Homo sapiens; identical to SEQ ID NO: 22

SEQ ID NO: 1292 - protein, 33 aa, Homo sapiens; identical to SEQ ID NO: 28

SEQ ID NO: 1293 - protein, 28 aa, Homo sapiens
KDLQQYVSVVVLDEVGLAEDSPKMPLKT

SEQ ID NO: 1294 - protein, 29 aa, Homo sapiens
RGIDKQGALLLEQDGVIKPWMGGEISLRS

SEQ ID NO: 1295 - protein, 18 aa, Homo sapiens
RATHYHLSSQVQEMAGKI

SEQ ID NO: 1296 - protein, 20 aa, Homo sapiens
KVGFVGISNWALDPAKMNRG

SEQ ID NO: 1297 - protein, 25 aa, Homo sapiens
RAPKPTLLWLQQFDTEYSFLKEVRN

SEQ ID NO: 1298 - protein, 23 aa, Homo sapiens
RQRHNSFADFLQAHLHTADLERH

SEQ ID NO: 1299 - protein, 30 aa, Homo sapiens
REAAEPLSEPKEDQEAAELLSEPEEESERH

SEQ ID NO: 1300 - protein, 21 aa, Homo sapiens
RGLSQEGTGPPTSAGEGHSRT

SEQ ID NO: 1301 - protein, 16 aa, Homo sapiens
KQFQNVQQVEYSSIRG

SEQ ID NO: 1302 - protein, 36 aa, Homo sapiens; identical to SEQ ID NO: 745

SEQ ID NO: 1303 - protein, 14 aa, Homo sapiens
RDGFHLVKDKADRT

SEQ ID NO: 1304 - protein, 36 aa, Homo sapiens; identical to SEQ ID NO: 745

SEQ ID NO: 1305 - protein, 18 aa, Homo sapiens
RAADFLSEPEGGPEMAKE

SEQ ID NO: 1306 - protein, 16 aa, Homo sapiens
KGYSLPEPIPLLNAKQ

SEQ ID NO: 1307 - protein, 35 aa, Homo sapiens; identical to SEQ ID NO: 1242

SEQ ID NO: 1308 - protein, 15 aa, Homo sapiens
RITVEYLQHIVEQKN

SEQ ID NO: 1309 - protein, 16 aa, Homo sapiens
RTEDAAQELLLPESKG

SEQ ID NO: 1310 - protein, 14 aa, Homo sapiens
RSAEKLQLPPLERL

SEQ ID NO: 1311 - protein, 25 aa, Homo sapiens
RLQHVTISQLFAPGDLPELGLEHRA

SEQ ID NO: 1312 - protein, 23 aa, Homo sapiens
RRVMEELPLMLLSEFSLVDKLRI

SEQ ID NO: 1313 - protein, 38 aa, Homo sapiens; identical to SEQ ID NO: 169

SEQ ID NO: 1314 - protein, 34 aa, Homo sapiens; identical to SEQ ID NO: 857

SEQ ID NO: 1315 - protein, 18 aa, Homo sapiens
RATHYHLSSQVQEMAGKI

SEQ ID NO: 1316 - protein, 33 aa, Homo sapiens; identical to SEQ ID NO: 28

SEQ ID NO: 1317 - protein, 34 aa, Homo sapiens; identical to SEQ ID NO: 67

SEQ ID NO: 1318 - protein, 31 aa, Homo sapiens; identical to SEQ ID NO: 957

SEQ ID NO: 1319 - protein, 34 aa, Homo sapiens; identical to SEQ ID NO: 67

SEQ ID NO: 1320 - protein, 22 aa, Homo sapiens
RVMEELPLMLLSEFSLVDKLRI

SEQ ID NO: 1321 - protein, 22 aa, Homo sapiens
RNNWEKEIAAVISPELEHLDKT

SEQ ID NO: 1322 - protein, 29 aa, Homo sapiens
RGIDKQGALLLEQDGVIKPWMGGEISLRS

SEQ ID NO: 1323 - protein, 34 aa, Homo sapiens; identical to SEQ ID NO: 857

SEQ ID NO: 1324 - protein, 34 aa, Homo sapiens; identical to SEQ ID NO: 67

SEQ ID NO: 1325 - protein, 38 aa, Homo sapiens; identical to SEQ ID NO: 169

SEQ ID NO: 1326 - protein, 34 aa, Homo sapiens; identical to SEQ ID NO: 40

SEQ ID NO: 1327 - protein, 23 aa, Homo sapiens
RLLLDEITRAQDLFLDGVPLRKT

SEQ ID NO: 1328 - protein, 17 aa, Homo sapiens
KIIYGDPVTFLPHLPRK

SEQ ID NO: 1329 - protein, 21 aa, Homo sapiens
KHTIALWQFLSAHKSEQLLRL

SEQ ID NO: 1330 - protein, 14 aa, Homo sapiens
RSSLTLATAINQRG

SEQ ID NO: 1331 - protein, 24 aa, Homo sapiens
KISPDTVLHLILPESPGSHEESRE

SEQ ID NO: 1332 - protein, 34 aa, Homo sapiens; identical to SEQ ID NO: 40

SEQ ID NO: 1333 - protein, 44 aa, Homo sapiens; identical to SEQ ID NO: 34

SEQ ID NO: 1334 - protein, 25 aa, Homo sapiens
RAPKPTLLWLQQFDTEYSFLKEVRN

SEQ ID NO: 1335 - protein, 29 aa, Homo sapiens
KQILGQLDGGSVAVLPVVDSTNQYLLDRI

SEQ ID NO: 1336 - protein, 29 aa, Homo sapiens
RGIDKQGALLLEQDGVIKPWMGGEISLRS

SEQ ID NO: 1337 - protein, 28 aa, Homo sapiens
KDLQQYVSVVVLDEVGLAEDSPKMPLKT

SEQ ID NO: 1338 - protein, 21 aa, Homo sapiens
KHTIALWQFLSAHKSEQLLRL

SEQ ID NO: 1339 - protein, 18 aa, Homo sapiens
RATHYHLSSQVQEMAGKI

SEQ ID NO: 1340 - protein, 29 aa, Homo sapiens
RGIDKQGALLLEQDGVIKPWMGGEISLRS

SEQ ID NO: 1341 - protein, 29 aa, Homo sapiens
KQILGQLDGGSVAVLPVVDSTNQYLLDRI

SEQ ID NO: 1342 - protein, 16 aa, Homo sapiens
RETLDQINQELIQAKK

SEQ ID NO: 1343 - protein, 35 aa, Homo sapiens; identical to SEQ ID NO: 1242

SEQ ID NO: 1344 - protein, 22 aa, Homo sapiens
RAALELFEQEGLAPYLPRWEKL

SEQ ID NO: 1345 - protein, 23 aa, Homo sapiens
RATHYHLSSQVQEMAGKIDLLRD

SEQ ID NO: 1346 - protein, 30 aa, Homo sapiens; identical to SEQ ID NO: 940

SEQ ID NO: 1347 - protein, 38 aa, Homo sapiens; identical to SEQ ID NO: 169

SEQ ID NO: 1348 - protein, 31 aa, Homo sapiens; identical to SEQ ID NO: 957

SEQ ID NO: 1349 - protein, 21 aa, Homo sapiens
RGLSQEGTGPPTSAGEGHSRT

SEQ ID NO: 1350 - protein, 29 aa, Homo sapiens
RGIDKQGALLLEQDGVIKPWMGGEISLRS

SEQ ID NO: 1351 - protein, 38 aa, Homo sapiens; identical to SEQ ID NO: 169

SEQ ID NO: 1352 - protein, 29 aa, Homo sapiens
RGIDKQGALLLEQDGVIKPWMGGEISLRS

SEQ ID NO: 1353 - protein, 25 aa, Homo sapiens
KLKAASEAPEEEVSLPWVHLAYQRF

SEQ ID NO: 1354 - protein, 34 aa, Homo sapiens; identical to SEQ ID NO: 67

SEQ ID NO: 1355 - protein, 26 aa, Homo sapiens
KLIALLANGEFHSGEQLGETLGMSRA

SEQ ID NO: 1356 - protein, 22 aa, Homo sapiens
RVMEELPLMLLSEFSLVDKLRI

SEQ ID NO: 1357 - protein, 16 aa, Homo sapiens
KTKDEMAAAEEKVGKN

SEQ ID NO: 1358 - protein, 26 aa, Homo sapiens
RVHALPPSLIPLVWDFGQLSDVAEKL

SEQ ID NO: 1359 - protein, 23 aa, Homo sapiens
KQNIFGPSQKVPGGEQEDAESRY

SEQ ID NO: 1360 - protein, 34 aa, Homo sapiens; identical to SEQ ID NO: 857

SEQ ID NO: 1361 - protein, 22 aa, Homo sapiens
KVGKETSELGGSDVSILDTTRL

SEQ ID NO: 1362 - protein, 22 aa, Homo sapiens
RVMEELPLMLLSEFSLVDKLRI

SEQ ID NO: 1363 - protein, 34 aa, Homo sapiens; identical to SEQ ID NO: 40

SEQ ID NO: 1364 - protein, 17 aa, Homo sapiens
RNDELNHLEEEGRFLKA

SEQ ID NO: 1365 - protein, 39 aa, Homo sapiens; identical to SEQ ID NO: 496

SEQ ID NO: 1366 - protein, 38 aa, Homo sapiens; identical to SEQ ID NO: 169

SEQ ID NO: 1367 - protein, 29 aa, Homo sapiens
RGIDKQGALLLEQDGVIKPWMGGEISLRS

SEQ ID NO: 1368 - protein, 35 aa, Homo sapiens; identical to SEQ ID NO: 1242

SEQ ID NO: 1369 - protein, 29 aa, Homo sapiens
KQILGQLDGGSVAVLPVVDSTNQYLLDRI

SEQ ID NO: 1370 - protein, 20 aa, Homo sapiens
KMLGHSADETIGVVHLVLRR

SEQ ID NO: 1371 - protein, 31 aa, Homo sapiens; identical to SEQ ID NO: 27

SEQ ID NO: 1372 - protein, 17 aa, Homo sapiens
KIIYGDPVTFLPHLPRK

SEQ ID NO: 1373 - protein, 25 aa, Homo sapiens
KSSLLGSGDWHQYYDIVYMKPHGRL

SEQ ID NO: 1374 - protein, 29 aa, Homo sapiens
KQILGQLDGGSVAVLPVVDSTNQYLLDRI

SEQ ID NO: 1375 - protein, 26 aa, Homo sapiens
KVFVTPQAPLEAIQAYLAGHYRVPKQ

SEQ ID NO: 1376 - protein, 20 aa, Homo sapiens
KMLGHSADETIGVVHLVLRR

SEQ ID NO: 1377 - protein, 15 aa, Homo sapiens
KVHGGTTADMIYSRV

SEQ ID NO: 1378 - protein, 34 aa, Homo sapiens; identical to SEQ ID NO: 40

SEQ ID NO: 1379 - protein, 26 aa, Homo sapiens
RKLKAASEAPEEEVSLPWVHLAYQRF

SEQ ID NO: 1380 - protein, 48 aa, Homo sapiens; identical to SEQ ID NO: 18

SEQ ID NO: 1381 - protein, 28 aa, Homo sapiens
RDWGVDVFTVPGKGYSLPEPIPLLNAKQ

SEQ ID NO: 1382 - protein, 22 aa, Homo sapiens
RVMEELPLMLLSEFSLVDKLRI

SEQ ID NO: 1383 - protein, 23 aa, Homo sapiens
RRVMEELPLMLLSEFSLVDKLRI

SEQ ID NO: 1384 - protein, 29 aa, Homo sapiens
RGIDKQGALLLEQDGVIKPWMGGEISLRS

SEQ ID NO: 1385 - protein, 56 aa, Homo sapiens; identical to SEQ ID NO: 22

SEQ ID NO: 1386 - protein, 29 aa, Homo sapiens
KQILGQLDGGSVAVLPVVDSTNQYLLDRI

SEQ ID NO: 1387 - protein, 21 aa, Homo sapiens
RHNSFADFLQAHLHTADLERH

SEQ ID NO: 1388 - protein, 39 aa, Homo sapiens; identical to SEQ ID NO: 496

SEQ ID NO: 1389 - protein, 30 aa, Homo sapiens; identical to SEQ ID NO: 940

SEQ ID NO: 1390 - protein, 25 aa, Homo sapiens
RDLVKQFQNVQQVEYSSIRGFLSKH

SEQ ID NO: 1391 - protein, 62 aa, Homo sapiens
RLQHVTISQLFAPGDLPELGLEHRAEDGHEEAMETEASTSGEVAEVAEEAMETESSEKVGKE

SEQ ID NO: 1392 - protein, 38 aa, Homo sapiens; identical to SEQ ID NO: 169

SEQ ID NO: 1393 - protein, 29 aa, Homo sapiens
RGIDKQGALLLEQDGVIKPWMGGEISLRS

SEQ ID NO: 1394 - protein, 29 aa, Homo sapiens
RGIDKQGALLLEQDGVIKPWMGGEISLRS

SEQ ID NO: 1395 - protein, 23 aa, Homo sapiens
RLSAYSLGGFAAEWLSQEYFHRQ

SEQ ID NO: 1396 - protein, 28 aa, Homo sapiens
KDLQQYVSVVVLDEVGLAEDSPKMPLKT

SEQ ID NO: 1397 - protein, 17 aa, Homo sapiens
RRLLNFDTELSTKEMRN

SEQ ID NO: 1398 - protein, 29 aa, Homo sapiens
RGIDKQGALLLEQDGVIKPWMGGEISLRS

SEQ ID NO: 1399 - protein, 29 aa, Homo sapiens
RGIDKQGALLLEQDGVIKPWMGGEISLRS

SEQ ID NO: 1400 - protein, 23 aa, Homo sapiens
KAASEAPEEEVSLPWVHLAYQRF

SEQ ID NO: 1401 - protein, 29 aa, Homo sapiens
RGIDKQGALLLEQDGVIKPWMGGEISLRS

SEQ ID NO: 1402 - protein, 25 aa, Homo sapiens
KSSLLGSGDWHQYYDIVYMKPHGRL

SEQ ID NO: 1403 - protein, 38 aa, Homo sapiens; identical to SEQ ID NO: 169

SEQ ID NO: 1404 - protein, 34 aa, Homo sapiens; identical to SEQ ID NO: 67

SEQ ID NO: 1405 - protein, 26 aa, Homo sapiens
RKLKAASEAPEEEVSLPWVHLAYQRF

SEQ ID NO: 1406 - protein, 62 aa, Homo sapiens; identical to SEQ ID NO: 1391

SEQ ID NO: 1407 - protein, 22 aa, Homo sapiens
RVMEELPLMLLSEFSLVDKLRI

SEQ ID NO: 1408 - protein, 20 aa, Homo sapiens
KTSAYSRNDELNHLEEEGRF

SEQ ID NO: 1409 - protein, 48 aa, Homo sapiens; identical to SEQ ID NO: 18

SEQ ID NO: 1410 - protein, 33 aa, Homo sapiens; identical to SEQ ID NO: 28

SEQ ID NO: 1411 - protein, 23 aa, Homo sapiens
KVFVTPQAPLEAIQAYLAGHYRV

SEQ ID NO: 1412 - protein, 23 aa, Homo sapiens
KQNIFGPSQKVPGGEQEDAESRY

SEQ ID NO: 1413 - protein, 35 aa, Homo sapiens; identical to SEQ ID NO: 1234

SEQ ID NO: 1414 - protein, 23 aa, Homo sapiens
RLSAYSLGGFAAEWLSQEYFHRQ

SEQ ID NO: 1415 - protein, 56 aa, Homo sapiens; identical to SEQ ID NO: 22

SEQ ID NO: 1416 - protein, 33 aa, Homo sapiens; identical to SEQ ID NO: 152

SEQ ID NO: 1417 - protein, 25 aa, Homo sapiens
RLQHVTISQLFAPGDLPELGLEHRA

SEQ ID NO: 1418 - protein, 21 aa, Homo sapiens
RGLSQEGTGPPTSAGEGHSRT

SEQ ID NO: 1419 - protein, 34 aa, Homo sapiens; identical to SEQ ID NO: 193

SEQ ID NO: 1420 - protein, 33 aa, Homo sapiens; identical to SEQ ID NO: 28

SEQ ID NO: 1421 - protein, 21 aa, Homo sapiens
RHNSFADFLQAHLHTADLERH

SEQ ID NO: 1422 - protein, 33 aa, Homo sapiens; identical to SEQ ID NO: 152

SEQ ID NO: 1423 - protein, 56 aa, Homo sapiens; identical to SEQ ID NO: 22

SEQ ID NO: 1424 - protein, 56 aa, Homo sapiens; identical to SEQ ID NO: 22

SEQ ID NO: 1425 - protein, 56 aa, Homo sapiens; identical to SEQ ID NO: 22

SEQ ID NO: 1426 - protein, 22 aa, Homo sapiens
RVMEELPLMLLSEFSLVDKLRI

SEQ ID NO: 1427 - protein, 33 aa, Homo sapiens; identical to SEQ ID NO: 152

SEQ ID NO: 1428 - protein, 23 aa, Homo sapiens
KQNIFGPSQKVPGGEQEDAESRY

SEQ ID NO: 1429 - protein, 21 aa, Homo sapiens
RGLSQEGTGPPTSAGEGHSRT

SEQ ID NO: 1430 - protein, 35 aa, Homo sapiens; identical to SEQ ID NO: 600

SEQ ID NO: 1431 - protein, 28 aa, Homo sapiens
KNLAFSPATMAHAFLPTMPEDLLAQARR

SEQ ID NO: 1432 - protein, 34 aa, Homo sapiens; identical to SEQ ID NO: 67

SEQ ID NO: 1433 - protein, 45 aa, Homo sapiens; identical to SEQ ID NO: 178

SEQ ID NO: 1434 - protein, 29 aa, Homo sapiens
RGIDKQGALLLEQDGVIKPWMGGEISLRS

SEQ ID NO: 1435 - protein, 34 aa, Homo sapiens; identical to SEQ ID NO: 67

SEQ ID NO: 1436 - protein, 34 aa, Homo sapiens; identical to SEQ ID NO: 67

SEQ ID NO: 1437 - protein, 17 aa, Homo sapiens
RALTEELHQKVSEEAKS

SEQ ID NO: 1438 - protein, 25 aa, Homo sapiens
RLQHVTISQLFAPGDLPELGLEHRA

SEQ ID NO: 1439 - protein, 29 aa, Homo sapiens
RGIDKQGALLLEQDGVIKPWMGGEISLRS

SEQ ID NO: 1440 - protein, 33 aa, Homo sapiens; identical to SEQ ID NO: 19

SEQ ID NO: 1441 - protein, 28 aa, Homo sapiens
KDLQQYVSVVVLDEVGLAEDSPKMPLKT

SEQ ID NO: 1442 - protein, 33 aa, Homo sapiens; identical to SEQ ID NO: 19

SEQ ID NO: 1443 - protein, 33 aa, Homo sapiens; identical to SEQ ID NO: 28

SEQ ID NO: 1444 - protein, 29 aa, Homo sapiens
KQILGQLDGGSVAVLPVVDSTNQYLLDRI

SEQ ID NO: 1445 - protein, 23 aa, Homo sapiens
KAASEAPEEEVSLPWVHLAYQRF

SEQ ID NO: 1446 - protein, 44 aa, Homo sapiens; identical to SEQ ID NO: 34

SEQ ID NO: 1447 - protein, 26 aa, Homo sapiens
KVFVTPQAPLEAIQAYLAGHYRVPKQ

SEQ ID NO: 1448 - protein, 34 aa, Homo sapiens; identical to SEQ ID NO: 67

SEQ ID NO: 1449 - protein, 34 aa, Homo sapiens; identical to SEQ ID NO: 857

SEQ ID NO: 1450 - protein, 27 aa, Homo sapiens
KLLSTFLNQTGLDAFLLELHEMIILKL

SEQ ID NO: 1451 - protein, 25 aa, Homo sapiens
KLKAASEAPEEEVSLPWVHLAYQRF

SEQ ID NO: 1452 - protein, 23 aa, Homo sapiens
RLSAYSLGGFAAEWLSQEYFHRQ

SEQ ID NO: 1453 - protein, 29 aa, Homo sapiens
RGIDKQGALLLEQDGVIKPWMGGEISLRS

SEQ ID NO: 1454 - protein, 34 aa, Homo sapiens; identical to SEQ ID NO: 857

SEQ ID NO: 1455 - protein, 34 aa, Homo sapiens; identical to SEQ ID NO: 67

SEQ ID NO: 1456 - protein, 28 aa, Homo sapiens
RDWGVDVFTVPGKGYSLPEPIPLLNAKQ

SEQ ID NO: 1457 - protein, 42 aa, Homo sapiens; identical to SEQ ID NO: 57

SEQ ID NO: 1458 - protein, 23 aa, Homo sapiens
RLSAYSLGGFAAEWLSQEYFHRQ

SEQ ID NO: 1459 - protein, 42 aa, Homo sapiens; identical to SEQ ID NO: 57

SEQ ID NO: 1460 - protein, 34 aa, Homo sapiens; identical to SEQ ID NO: 67

SEQ ID NO: 1461 - protein, 42 aa, Homo sapiens; identical to SEQ ID NO: 57

SEQ ID NO: 1462 - protein, 45 aa, Homo sapiens; identical to SEQ ID NO: 178

SEQ ID NO: 1463 - protein, 34 aa, Homo sapiens; identical to SEQ ID NO: 67

SEQ ID NO: 1464 - protein, 43 aa, Homo sapiens
  SITE 20: note = Phosphorylated residue
KESLGLNGDFSVLNTLLNFTDNFDDFRRETLDQINQELIQAKK

SEQ ID NO: 1465 - protein, 45 aa, Homo sapiens
  SITE 12: note = Phosphorylated residue
  SITE 20: note = Phosphorylated residue
KASTLSPGGGVTVFFHAIISLHFPFNPDLHKVFIRGGEEFGESKW

SEQ ID NO: 1466 - protein, 37 aa, Homo sapiens
  SITE 7: note = Phosphorylated residue
RDFATPSLHTSDQSPGKHMVTMDGVREEDLAPFSLRK

SEQ ID NO: 1467 - protein, 35 aa, Homo sapiens; identical to SEQ ID NO: 600
  SITE 19: note = Phosphorylated residue

SEQ ID NO: 1468 - protein, 48 aa, Homo sapiens; identical to SEQ ID NO: 18
  SITE 21: note = Phosphorylated residue

SEQ ID NO: 1469 - protein, 48 aa, Homo sapiens; identical to SEQ ID NO: 18
  SITE 27: note = Phosphorylated residue

SEQ ID NO: 1470 - protein, 48 aa, Homo sapiens; identical to SEQ ID NO: 18
  SITE 27: note = Phosphorylated residue

SEQ ID NO: 1471 - protein, 48 aa, Homo sapiens; identical to SEQ ID NO: 18
  SITE 21: note = Phosphorylated residue

SEQ ID NO: 1472 - protein, 33 aa, Homo sapiens; identical to SEQ ID NO: 19
  SITE 3: note = Phosphorylated residue
  SITE 4: note = Phosphorylated residue

SEQ ID NO: 1473 - protein, 33 aa, Homo sapiens; identical to SEQ ID NO: 19
  SITE 4: note = Phosphorylated residue
  SITE 15: note = Phosphorylated residue

SEQ ID NO: 1474 - protein, 52 aa, Homo sapiens
  SITE 18: note = Phosphorylated residue
  SITE 27: note = Phosphorylated residue
  SITE 28: note = Phosphorylated residue
  SITE 48: note = Phosphorylated residue
RTEDAAQELLLPESKGGSSEPGTELQTTEQQAGASASMAVDAVAEPANAVKG

SEQ ID NO: 1475 - protein, 51 aa, Homo sapiens
  SITE 8: note = Phosphorylated residue
  SITE 16: note = Phosphorylated residue
  SITE 18: note = Phosphorylated residue
  SITE 49: note = Phosphorylated residue
RMGKPIPNPLLGLDSTASKDNTVPLKLIALLANGEFHSGEQLGETLGMSRA

SEQ ID NO: 1476 - protein, 71 aa, Homo sapiens; identical to SEQ ID NO: 21
  SITE 67: note = Phosphorylated residue

SEQ ID NO: 1477 - protein, 41 aa, Homo sapiens
  SITE 10: note = Phosphorylated residue
KMVLLLNLQNLYESLYDALNQYYVHLGGQKYVDLGLGTHRV

SEQ ID NO: 1478 - protein, 33 aa, Homo sapiens
  SITE 30: note = Phosphorylated residue
RPDTPPWARDLWMFIFSDTMLLNIPLVMNNERH

SEQ ID NO: 1479 - protein, 15 aa, Homo sapiens
  SITE 5: note = Phosphorylated residue
RGSPNETELIESAKG

SEQ ID NO: 1480 - protein, 14 aa, Homo sapiens
  SITE 11: note = Phosphorylated residue
KQTLSAAAVFNDRL

SEQ ID NO: 1481 - protein, 16 aa, Homo sapiens
  SITE 7: note = Phosphorylated residue
KTLPTMNNLISQDKRI

SEQ ID NO: 1482 - protein, 23 aa, Homo sapiens
  SITE 12: note = Phosphorylated residue
KTSAYSRNDELNHLEEEGRFLKA

SEQ ID NO: 1483 - protein, 45 aa, Homo sapiens; identical to SEQ ID NO: 178
  SITE 34: note = Phosphorylated residue

SEQ ID NO: 1484 - protein, 14 aa, Homo sapiens
  SITE 5: note = Phosphorylated residue
RRLLNFDTELSTKE

SEQ ID NO: 1485 - protein, 16 aa, Homo sapiens
  SITE 9: note = Phosphorylated residue
RFATSLVDNSVPLLRA

SEQ ID NO: 1486 - protein, 17 aa, Homo sapiens
  SITE 9: note = Phosphorylated residue
KVGFVGISNWALDPAKM

SEQ ID NO: 1487 - protein, 33 aa, Homo sapiens; identical to SEQ ID NO: 19
  SITE 15: note = Phosphorylated residue

SEQ ID NO: 1488 - protein, 17 aa, Homo sapiens
  SITE 6: note = Phosphorylated residue
RNDELNHLEEEGRFLKA

SEQ ID NO: 1489 - protein, 17 aa, Homo sapiens
  SITE 9: note = Phosphorylated residue
KVGFVGISNWALDPAKM

SEQ ID NO: 1490 - protein, 24 aa, Homo sapiens
  SITE 2: note = Phosphorylated residue
RNFSGKDDIQALDIFLANLPEAKC

SEQ ID NO: 1491 - protein, 16 aa, Homo sapiens
  SITE 9: note = Phosphorylated residue
RFATSLVDNSVPLLRA

SEQ ID NO: 1492 - protein, 24 aa, Homo sapiens
  SITE 2: note = Phosphorylated residue
RNFSGKDDIQALDIFLANLPEAKC

SEQ ID NO: 1493 - protein, 20 aa, Homo sapiens
  SITE 5: note = Phosphorylated residue
KVGKNEQGEPEDLKKPEGKN

SEQ ID NO: 1494 - protein, 17 aa, Homo sapiens
  SITE 2: note = Phosphorylated residue
RNDELNHLEEEGRFLKA

SEQ ID NO: 1495 - protein, 24 aa, Homo sapiens
  SITE 15: note = Phosphorylated residue
RDLYQGLLLQRVPFNVDFDKLPRH

SEQ ID NO: 1496 - protein, 14 aa, Homo sapiens
  SITE 6: note = Phosphorylated residue
RNDELNHLEEEGRF

SEQ ID NO: 1497 - protein, 17 aa, Homo sapiens
  SITE 6: note = Phosphorylated residue
RNDELNHLEEEGRFLKA

SEQ ID NO: 1498 - protein, 22 aa, Homo sapiens
  SITE 2: note = Phosphorylated residue
RNNWEKEIAAVISPELEHLDKT

SEQ ID NO: 1499 - protein, 14 aa, Homo sapiens
  SITE 6: note = Phosphorylated residue
RNDELNHLEEEGRF

SEQ ID NO: 1500 - protein, 16 aa, Homo sapiens
  SITE 9: note = Phosphorylated residue
RFATSLVDNSVPLLRA

SEQ ID NO: 1501 - protein, 17 aa, Homo sapiens
  SITE 6: note = Phosphorylated residue
RNDELNHLEEEGRFLKA

SEQ ID NO: 1502 - protein, 14 aa, Homo sapiens
  SITE 6: note = Phosphorylated residue
RNDELNHLEEEGRF

SEQ ID NO: 1503 - protein, 16 aa, Homo sapiens
  SITE 9: note = Phosphorylated residue
RFATSLVDNSVPLLRA

SEQ ID NO: 1504 - protein, 14 aa, Homo sapiens
  SITE 6: note = Phosphorylated residue
RSLETNGEINLPKD

SEQ ID NO: 1505 - protein, 29 aa, Homo sapiens
  SITE 22: note = Phosphorylated residue
KQILGQLDGGSVAVLPVVDSTNQYLLDRI

SEQ ID NO: 1506 - protein, 14 aa, Homo sapiens
  SITE 5: note = Phosphorylated residue
RGGTNADTIKLVKV

SEQ ID NO: 1507 - protein, 22 aa, Homo sapiens
  SITE 2: note = Phosphorylated residue
RNNWEKEIAAVISPELEHLDKT

SEQ ID NO: 1508 - protein, 16 aa, Homo sapiens
  SITE 9: note = Phosphorylated residue
RFATSLVDNSVPLLRA

SEQ ID NO: 1509 - protein, 29 aa, Homo sapiens
  SITE 22: note = Phosphorylated residue
KQILGQLDGGSVAVLPVVDSTNQYLLDRI

SEQ ID NO: 1510 - protein, 28 aa, Homo sapiens
  SITE 25: note = Phosphorylated residue
RDWGVDVFTVPGKGYSLPEPIPLLNAKQ

SEQ ID NO: 1511 - protein, 16 aa, Homo sapiens
  SITE 9: note = Phosphorylated residue
RFATSLVDNSVPLLRA

SEQ ID NO: 1512 - protein, 20 aa, Homo sapiens
  SITE 15: note = Phosphorylated residue
RITVEYLQHIVEQKNGKERV

SEQ ID NO: 1513 - protein, 44 aa, Homo sapiens; identical to SEQ ID NO: 34
  SITE 31: note = Phosphorylated residue

SEQ ID NO: 1514 - protein, 16 aa, Homo sapiens
  SITE 9: note = Phosphorylated residue
RFATSLVDNSVPLLRA

SEQ ID NO: 1515 - protein, 26 aa, Homo sapiens
  SITE 8: note = Phosphorylated residue
KLIALLANGEFHSGEQLGETLGMSRA

SEQ ID NO: 1516 - protein, 29 aa, Homo sapiens
  SITE 22: note = Phosphorylated residue
KQILGQLDGGSVAVLPVVDSTNQYLLDRI

SEQ ID NO: 1517 - protein, 17 aa, Homo sapiens
  SITE 6: note = Phosphorylated residue
RNDELNHLEEEGRFLKA

SEQ ID NO: 1518 - protein, 28 aa, Homo sapiens
  SITE 25: note = Phosphorylated residue
RDWGVDVFTVPGKGYSLPEPIPLLNAKQ

SEQ ID NO: 1519 - protein, 26 aa, Homo sapiens
  SITE 8: note = Phosphorylated residue
KLIALLANGEFHSGEQLGETLGMSRA

SEQ ID NO: 1520 - protein, 17 aa, Homo sapiens
  SITE 2: note = Phosphorylated residue
RNDELNHLEEEGRFLKA

SEQ ID NO: 1521 - protein, 28 aa, Homo sapiens
  SITE 25: note = Phosphorylated residue
RDWGVDVFTVPGKGYSLPEPIPLLNAKQ

SEQ ID NO: 1522 - protein, 38 aa, Homo sapiens
  SITE 19: note = Phosphorylated residue
  SITE 33: note = Phosphorylated residue
KSSLLGSGDWHQYYDIVYMKPHGRLQKVMNHITDGPRK

SEQ ID NO: 1523 - protein, 69 aa, Homo sapiens
  SITE 3: note = Phosphorylated residue
  SITE 7: note = Phosphorylated residue
  SITE 61: note = Phosphorylated residue
RSTLMVSDVTRLQHVTISQLFAPGDLPELGLEHRAEDGHEEAMETEASTSGEVAEVAEEAMETESSEKV

SEQ ID NO: 1524 - protein, 42 aa, Homo sapiens
  SITE 9: note = Phosphorylated residue
  SITE 22: note = Phosphorylated residue
  SITE 26: note = Phosphorylated residue
RDGNLELLTRPDTPPWARDLWMFIFSDTMLLNIPLVMNNERH

SEQ ID NO: 1525 - protein, 54 aa, Homo sapiens
  SITE 5: note = Phosphorylated residue
  SITE 9: note = Phosphorylated residue
  SITE 11: note = Phosphorylated residue
  SITE 51: note = Phosphorylated residue
RDLWMFIFSDTMLLNIPLVMNNERHKGEMAYIVVQNHMNLSENASNNVPFSWKI

SEQ ID NO: 1526 - protein, 17 aa, Homo sapiens
  SITE 3: note = Phosphorylated residue
KVMNHITDGPRKDLVKG

SEQ ID NO: 1527 - protein, 20 aa, Homo sapiens
  SITE 17: note = Phosphorylated residue
KDVVKQQGLRQDHPGQMDRY

SEQ ID NO: 1528 - protein, 17 aa, Homo sapiens
  SITE 3: note = Phosphorylated residue
KVMNHITDGPRKDLVKG

SEQ ID NO: 1529 - protein, 20 aa, Homo sapiens
  SITE 3: note = Phosphorylated residue
RVMEELPLMLLSEFSLVDKL

SEQ ID NO: 1530 - protein, 20 aa, Homo sapiens
  SITE 17: note = Phosphorylated residue
KVGFVGISNWALDPAKMNRG

SEQ ID NO: 1531 - protein, 10 aa, Homo sapiens
  SITE 4: note = Phosphorylated residue
RIIMEQSMRC

SEQ ID NO: 1532 - protein, 59 aa, Homo sapiens; identical to SEQ ID NO: 88
  SITE 51: note = Phosphorylated residue

SEQ ID NO: 1533 - protein, 16 aa, Homo sapiens
  SITE 14: note = Phosphorylated residue
RLLNFDTELSTKEMRN

SEQ ID NO: 1534 - protein, 20 aa, Homo sapiens
  SITE 16: note = Phosphorylated residue
RFRPQWSLRDTLVSYMQTKE

SEQ ID NO: 1535 - protein, 20 aa, Homo sapiens
  SITE 17: note = Phosphorylated residue
KVGFVGISNWALDPAKMNRG

SEQ ID NO: 1536 - protein, 16 aa, Homo sapiens
  SITE 14: note = Phosphorylated residue
RLLNFDTELSTKEMRN

SEQ ID NO: 1537 - protein, 22 aa, Homo sapiens
  SITE 6: note = Phosphorylated residue
KHMVTMDGVREEDLAPFSLRKR

SEQ ID NO: 1538 - protein, 15 aa, Homo sapiens
  SITE 10: note = Phosphorylated residue
KVHGGTTADMIYSRV

SEQ ID NO: 1539 - protein, 14 aa, Homo sapiens
  SITE 2: note = Phosphorylated residue
RMKQPPATTPPFKT

SEQ ID NO: 1540 - protein, 12 aa, Homo sapiens
  SITE 8: note = Phosphorylated residue
RDTLVSYMQTKE

SEQ ID NO: 1541 - protein, 14 aa, Homo sapiens
  SITE 2: note = Phosphorylated residue
RMKQPPATTPPFKT

SEQ ID NO: 1542 - protein, 20 aa, Homo sapiens
  SITE 17: note = Phosphorylated residue
KDVVKQQGLRQDHPGQMDRY

SEQ ID NO: 1543 - protein, 14 aa, Homo sapiens
  SITE 2: note = Phosphorylated residue
RMKQPPATTPPFKT

SEQ ID NO: 1544 - protein, 25 aa, Homo sapiens
  SITE 13: note = Phosphorylated residue
KQQGLRQDHPGQMDRYLVYGDEYKA

SEQ ID NO: 1545 - protein, 20 aa, Homo sapiens
  SITE 8: note = Phosphorylated residue
KTIVADAMQGPAAYSDLFRS

SEQ ID NO: 1546 - protein, 28 aa, Homo sapiens
  SITE 24: note = Phosphorylated residue
KDLQQYVSVVVLDEVGLAEDSPKMPLKT

SEQ ID NO: 1547 - protein, 11 aa, Homo sapiens
  SITE 4: note = Phosphorylated residue
RVSMEETADRL

SEQ ID NO: 1548 - protein, 15 aa, Homo sapiens
  SITE 10: note = Phosphorylated residue
KVHGGTTADMIYSRV

SEQ ID NO: 1549 - protein, 15 aa, Homo sapiens
  SITE 10: note = Phosphorylated residue
KVHGGTTADMIYSRV

SEQ ID NO: 1550 - protein, 20 aa, Homo sapiens
  SITE 17: note = Phosphorylated residue
KDVVKQQGLRQDHPGQMDRY

SEQ ID NO: 1551 - protein, 23 aa, Homo sapiens
  SITE 3: note = Phosphorylated residue
RGMEFVQGLSKPGRPHQWVFPKD

SEQ ID NO: 1552 - protein, 23 aa, Homo sapiens
  SITE 3: note = Phosphorylated residue
RGMEFVQGLSKPGRPHQWVFPKD

SEQ ID NO: 1553 - protein, 20 aa, Homo sapiens
  SITE 17: note = Phosphorylated residue
KDVVKQQGLRQDHPGQMDRY

SEQ ID NO: 1554 - protein, 10 aa, Homo sapiens
  SITE 4: note = Phosphorylated residue
RIIMEQSMRC

SEQ ID NO: 1555 - protein, 25 aa, Homo sapiens
  SITE 13: note = Phosphorylated residue
KQQGLRQDHPGQMDRYLVYGDEYKA

SEQ ID NO: 1556 - protein, 15 aa, Homo sapiens
  SITE 10: note = Phosphorylated residue
KVHGGTTADMIYSRV

SEQ ID NO: 1557 - protein, 15 aa, Homo sapiens
  SITE 10: note = Phosphorylated residue
KVHGGTTADMIYSRV

SEQ ID NO: 1558 - protein, 16 aa, Homo sapiens
  SITE 4: note = Phosphorylated residue
REQMLDTSSLLQFMRE

SEQ ID NO: 1559 - protein, 15 aa, Homo sapiens
  SITE 10: note = Phosphorylated residue
KVHGGTTADMIYSRV

SEQ ID NO: 1560 - protein, 14 aa, Homo sapiens
  SITE 2: note = Phosphorylated residue
RMKQPPATTPPFKT

SEQ ID NO: 1561 - skipped

SEQ ID NO: 1562 - protein, 18 aa, Homo sapiens
  SITE 14: note = Phosphorylated residue
RATHYHLSSQVQEMAGKI

SEQ ID NO: 1563 - protein, 28 aa, Homo sapiens
  SITE 9: note = Phosphorylated residue
KDLEQLAKMLGHSADETIGVVHLVLRRL

SEQ ID NO: 1564 - protein, 17 aa, Homo sapiens
  SITE 3: note = Phosphorylated residue
KVMNHITDGPRKDLVKG

SEQ ID NO: 1565 - protein, 15 aa, Homo sapiens
  SITE 11: note = Phosphorylated residue
RHDWNYEHLFMDIKN

SEQ ID NO: 1566 - protein, 18 aa, Homo sapiens
  SITE 14: note = Phosphorylated residue
RATHYHLSSQVQEMAGKI

SEQ ID NO: 1567 - protein, 38 aa, Homo sapiens; identical to SEQ ID NO: 169
  SITE 24: note = Phosphorylated residue

SEQ ID NO: 1568 - protein, 18 aa, Homo sapiens
  SITE 14: note = Phosphorylated residue
RATHYHLSSQVQEMAGKI

SEQ ID NO: 1569 - protein, 15 aa, Homo sapiens
  SITE 11: note = Phosphorylated residue
RHDWNYEHLFMDIKN

SEQ ID NO: 1570 - protein, 9 aa, Homo sapiens
  SITE 7: note = Phosphorylated residue
KILAIEMRF

SEQ ID NO: 1571 - protein, 22 aa, Homo sapiens
  SITE 6: note = Phosphorylated residue
KHMVTMDGVREEDLAPFSLRKR

SEQ ID NO: 1572 - protein, 18 aa, Homo sapiens
  SITE 14: note = Phosphorylated residue
RATHYHLSSQVQEMAGKI

SEQ ID NO: 1573 - protein, 18 aa, Homo sapiens
  SITE 14: note = Phosphorylated residue
RATHYHLSSQVQEMAGKI

SEQ ID NO: 1574 - protein, 16 aa, Homo sapiens
  SITE 6: note = Phosphorylated residue
KTLPTMNNLISQDKRI

SEQ ID NO: 1575 - protein, 33 aa, Homo sapiens; identical to SEQ ID NO: 19
  SITE 30: note = Phosphorylated residue

SEQ ID NO: 1576 - protein, 14 aa, Homo sapiens
  SITE 2: note = Phosphorylated residue
RMKQPPATTPPFKT

SEQ ID NO: 1577 - protein, 20 aa, Homo sapiens
  SITE 3: note = Phosphorylated residue
RVMEELPLMLLSEFSLVDKL

SEQ ID NO: 1578 - protein, 17 aa, Homo sapiens
  SITE 3: note = Phosphorylated residue
KVMNHITDGPRKDLVKG

SEQ ID NO: 1579 - protein, 12 aa, Homo sapiens
  SITE 5: note = Phosphorylated residue
RSTLMVSDVTRL

SEQ ID NO: 1580 - protein, 15 aa, Homo sapiens
  SITE 10: note = Phosphorylated residue
KVHGGTTADMIYSRV

SEQ ID NO: 1581 - protein, 13 aa, Homo sapiens
  SITE 6: note = Phosphorylated residue
RRSTLMVSDVTRL

SEQ ID NO: 1582 - protein, 15 aa, Homo sapiens
  SITE 10: note = Phosphorylated residue
KVHGGTTADMIYSRV

SEQ ID NO: 1583 - protein, 15 aa, Homo sapiens
  SITE 10: note = Phosphorylated residue
KVHGGTTADMIYSRV

SEQ ID NO: 1584 - protein, 14 aa, Homo sapiens
  SITE 2: note = Phosphorylated residue
RMKQPPATTPPFKT

SEQ ID NO: 1585 - protein, 15 aa, Homo sapiens
  SITE 10: note = Phosphorylated residue
KVHGGTTADMIYSRV

SEQ ID NO: 1586 - protein, 16 aa, Homo sapiens
  SITE 6: note = Phosphorylated residue
KTLPTMNNLISQDKRI

SEQ ID NO: 1587 - protein, 18 aa, Homo sapiens
  SITE 4: note = Phosphorylated residue
RVSMEETADRLGSIPLRQ

SEQ ID NO: 1588 - protein, 18 aa, Homo sapiens
  SITE 14: note = Phosphorylated residue
RILTIYPQVLHSLMEARW

SEQ ID NO: 1589 - protein, 14 aa, Homo sapiens
  SITE 2: note = Phosphorylated residue
RMKQPPATTPPFKT

SEQ ID NO: 1590 - protein, 25 aa, Homo sapiens
  SITE 19: note = Phosphorylated residue
KSSLLGSGDWHQYYDIVYMKPHGRL

SEQ ID NO: 1591 - protein, 16 aa, Homo sapiens
  SITE 4: note = Phosphorylated residue
REQMLDTSSLLQFMRE

SEQ ID NO: 1592 - protein, 14 aa, Homo sapiens
  SITE 2: note = Phosphorylated residue
RMKQPPATTPPFKT

SEQ ID NO: 1593 - protein, 21 aa, Homo sapiens
  SITE 10: note = Phosphorylated residue
RRVMEELPLMLLSEFSLVDKL

SEQ ID NO: 1594 - protein, 16 aa, Homo sapiens
  SITE 6: note = Phosphorylated residue
KTLPTMNNLISQDKRI

SEQ ID NO: 1595 - protein, 19 aa, Homo sapiens
  SITE 15: note = Phosphorylated residue
RLSQAFIDLHSAGNMLFRT

SEQ ID NO: 1596 - protein, 20 aa, Homo sapiens
  SITE 3: note = Phosphorylated residue
RVMEELPLMLLSEFSLVDKL

SEQ ID NO: 1597 - protein, 31 aa, Homo sapiens; identical to SEQ ID NO: 27
  SITE 21: note = Phosphorylated residue

SEQ ID NO: 1598 - protein, 15 aa, Homo sapiens
  SITE 11: note = Phosphorylated residue
RHDWNYEHLFMDIKN

SEQ ID NO: 1599 - protein, 12 aa, Homo sapiens
  SITE 5: note = Phosphorylated residue
RSTLMVSDVTRL

SEQ ID NO: 1600 - protein, 18 aa, Homo sapiens
  SITE 14: note = Phosphorylated residue
RATHYHLSSQVQEMAGKI

SEQ ID NO: 1601 - protein, 15 aa, Homo sapiens
  SITE 10: note = Phosphorylated residue
KVHGGTTADMIYSRV

SEQ ID NO: 1602 - protein, 12 aa, Homo sapiens
  SITE 5: note = Phosphorylated residue
RSTLMVSDVTRL

SEQ ID NO: 1603 - protein, 31 aa, Homo sapiens; identical to SEQ ID NO: 27
  SITE 21: note = Phosphorylated residue

SEQ ID NO: 1604 - protein, 15 aa, Homo sapiens
  SITE 11: note = Phosphorylated residue
RHDWNYEHLFMDIKN

SEQ ID NO: 1605 - protein, 18 aa, Homo sapiens
  SITE 4: note = Phosphorylated residue
RVSMEETADRLGSIPLRQ

SEQ ID NO: 1606 - protein, 22 aa, Homo sapiens
  SITE 9: note = Phosphorylated residue
RVMEELPLMLLSEFSLVDKLRI

SEQ ID NO: 1607 - protein, 38 aa, Homo sapiens; identical to SEQ ID NO: 169
  SITE 24: note = Phosphorylated residue

SEQ ID NO: 1608 - protein, 22 aa, Homo sapiens
  SITE 9: note = Phosphorylated residue
RVMEELPLMLLSEFSLVDKLRI

SEQ ID NO: 1609 - protein, 18 aa, Homo sapiens
  SITE 14: note = Phosphorylated residue
RILTIYPQVLHSLMEARW

SEQ ID NO: 1610 - protein, 20 aa, Homo sapiens
  SITE 17: note = Phosphorylated residue
KVGFVGISNWALDPAKMNRG

SEQ ID NO: 1611 - protein, 17 aa, Homo sapiens
  SITE 11: note = Phosphorylated residue
RHDWNYEHLFMDIKNKM

SEQ ID NO: 1612 - protein, 29 aa, Homo sapiens
  SITE 21: note = Phosphorylated residue
RGIDKQGALLLEQDGVIKPWMGGEISLRS

SEQ ID NO: 1613 - protein, 18 aa, Homo sapiens
  SITE 4: note = Phosphorylated residue
RVSMEETADRLGSIPLRQ

SEQ ID NO: 1614 - protein, 20 aa, Homo sapiens
  SITE 9: note = Phosphorylated residue
RVMEELPLMLLSEFSLVDKL

SEQ ID NO: 1615 - protein, 18 aa, Homo sapiens
  SITE 14: note = Phosphorylated residue
RATHYHLSSQVQEMAGKI

SEQ ID NO: 1616 - protein, 34 aa, Homo sapiens; identical to SEQ ID NO: 193
  SITE 22: note = Phosphorylated residue

SEQ ID NO: 1617 - protein, 33 aa, Homo sapiens; identical to SEQ ID NO: 152
  SITE 29: note = Phosphorylated residue

SEQ ID NO: 1618 - protein, 18 aa, Homo sapiens
  SITE 15: note = Phosphorylated residue
RAADFLSEPEGGPEMAKE

SEQ ID NO: 1619 - protein, 33 aa, Homo sapiens; identical to SEQ ID NO: 152
  SITE 29: note = Phosphorylated residue

SEQ ID NO: 1620 - protein, 23 aa, Homo sapiens
  SITE 3: note = Phosphorylated residue
RGMEFVQGLSKPGRPHQWVFPKD

SEQ ID NO: 1621 - protein, 16 aa, Homo sapiens
  SITE 14: note = Phosphorylated residue
RLLNFDTELSTKEMRN

SEQ ID NO: 1622 - protein, 29 aa, Homo sapiens
  SITE 21: note = Phosphorylated residue
RGIDKQGALLLEQDGVIKPWMGGEISLRS

SEQ ID NO: 1623 - protein, 12 aa, Homo sapiens
  SITE 8: note = Phosphorylated residue
RDTLVSYMQTKE

SEQ ID NO: 1624 - protein, 20 aa, Homo sapiens
  SITE 15: note = Phosphorylated residue
RAADFLSEPEGGPEMAKEKQ

SEQ ID NO: 1625 - protein, 21 aa, Homo sapiens
  SITE 2: note = Phosphorylated residue
KMLGHSADETIGVVHLVLRRL

SEQ ID NO: 1626 - protein, 22 aa, Homo sapiens
  SITE 3: note = Phosphorylated residue
RVMEELPLMLLSEFSLVDKLRI

SEQ ID NO: 1627 - protein, 29 aa, Homo sapiens
  SITE 21: note = Phosphorylated residue
RGIDKQGALLLEQDGVIKPWMGGEISLRS

SEQ ID NO: 1628 - protein, 28 aa, Homo sapiens
  SITE 18: note = Phosphorylated residue
KNLAFSPATMAHAFLPTMPEDLLAQARR

SEQ ID NO: 1629 - protein, 18 aa, Homo sapiens
  SITE 14: note = Phosphorylated residue
RATHYHLSSQVQEMAGKI

SEQ ID NO: 1630 - protein, 31 aa, Homo sapiens; identical to SEQ ID NO: 27
  SITE 21: note = Phosphorylated residue

SEQ ID NO: 1631 - protein, 28 aa, Homo sapiens
  SITE 24: note = Phosphorylated residue
KDLQQYVSVVVLDEVGLAEDSPKMPLKT

SEQ ID NO: 1632 - protein, 15 aa, Homo sapiens
  SITE 10: note = Phosphorylated residue
KVHGGTTADMIYSRV

SEQ ID NO: 1633 - protein, 23 aa, Homo sapiens
  SITE 10: note = Phosphorylated residue
RRVMEELPLMLLSEFSLVDKLRI

SEQ ID NO: 1634 - protein, 29 aa, Homo sapiens
  SITE 21: note = Phosphorylated residue
RGIDKQGALLLEQDGVIKPWMGGEISLRS

SEQ ID NO: 1635 - protein, 20 aa, Homo sapiens
  SITE 9: note = Phosphorylated residue
RVMEELPLMLLSEFSLVDKL

SEQ ID NO: 1636 - protein, 22 aa, Homo sapiens
  SITE 9: note = Phosphorylated residue
RVMEELPLMLLSEFSLVDKLRI

SEQ ID NO: 1637 - protein, 33 aa, Homo sapiens; identical to SEQ ID NO: 19
  SITE 30: note = Phosphorylated residue

SEQ ID NO: 1638 - protein, 59 aa, Homo sapiens; identical to SEQ ID NO: 88
  SITE 33: note = Phosphorylated residue

SEQ ID NO: 1639 - protein, 28 aa, Homo sapiens
  SITE 10: note = Phosphorylated residue
KNLAFSPATMAHAFLPTMPEDLLAQARR

SEQ ID NO: 1640 - protein, 20 aa, Homo sapiens
  SITE 17: note = Phosphorylated residue
KVGFVGISNWALDPAKMNRG

SEQ ID NO: 1641 - protein, 38 aa, Homo sapiens; identical to SEQ ID NO: 169
  SITE 24: note = Phosphorylated residue

SEQ ID NO: 1642 - protein, 28 aa, Homo sapiens
  SITE 24: note = Phosphorylated residue
KDLQQYVSVVVLDEVGLAEDSPKMPLKT

SEQ ID NO: 1643 - protein, 20 aa, Homo sapiens
  SITE 15: note = Phosphorylated residue
RAADFLSEPEGGPEMAKEKQ

SEQ ID NO: 1644 - protein, 20 aa, Homo sapiens
  SITE 15: note = Phosphorylated residue
RAADFLSEPEGGPEMAKEKQ

SEQ ID NO: 1645 - protein, 29 aa, Homo sapiens
  SITE 21: note = Phosphorylated residue
RGIDKQGALLLEQDGVIKPWMGGEISLRS

SEQ ID NO: 1646 - protein, 20 aa, Homo sapiens
  SITE 17: note = Phosphorylated residue
KVGFVGISNWALDPAKMNRG

SEQ ID NO: 1647 - protein, 23 aa, Homo sapiens
  SITE 10: note = Phosphorylated residue
RRVMEELPLMLLSEFSLVDKLRI

SEQ ID NO: 1648 - protein, 20 aa, Homo sapiens
  SITE 8: note = Phosphorylated residue
KTIVADAMQGPAAYSDLFRS

SEQ ID NO: 1649 - protein, 29 aa, Homo sapiens
  SITE 21: note = Phosphorylated residue
RGIDKQGALLLEQDGVIKPWMGGEISLRS

SEQ ID NO: 1650 - protein, 22 aa, Homo sapiens
  SITE 9: note = Phosphorylated residue
RVMEELPLMLLSEFSLVDKLRI

SEQ ID NO: 1651 - protein, 22 aa, Homo sapiens
  SITE 9: note = Phosphorylated residue
RVMEELPLMLLSEFSLVDKLRI

SEQ ID NO: 1652 - protein, 22 aa, Homo sapiens
  SITE 3: note = Phosphorylated residue
RVMEELPLMLLSEFSLVDKLRI

SEQ ID NO: 1653 - protein, 29 aa, Homo sapiens
  SITE 21: note = Phosphorylated residue
RGIDKQGALLLEQDGVIKPWMGGEISLRS

SEQ ID NO: 1654 - protein, 33 aa, Homo sapiens; identical to SEQ ID NO: 19
  SITE 30: note = Phosphorylated residue

SEQ ID NO: 1655 - protein, 38 aa, Homo sapiens; identical to SEQ ID NO: 169
  SITE 24: note = Phosphorylated residue

SEQ ID NO: 1656 - protein, 38 aa, Homo sapiens; identical to SEQ ID NO: 169
  SITE 24: note = Phosphorylated residue

SEQ ID NO: 1657 - protein, 38 aa, Homo sapiens; identical to SEQ ID NO: 169
  SITE 24: note = Phosphorylated residue

SEQ ID NO: 1658 - protein, 22 aa, Homo sapiens
  SITE 3: note = Phosphorylated residue
RVMEELPLMLLSEFSLVDKLRI

SEQ ID NO: 1659 - protein, 25 aa, Homo sapiens
  SITE 17: note = Phosphorylated residue
KQGALLLEQDGVIKPWMGGEISLRS

SEQ ID NO: 1660 - protein, 29 aa, Homo sapiens
  SITE 21: note = Phosphorylated residue
RGIDKQGALLLEQDGVIKPWMGGEISLRS

SEQ ID NO: 1661 - protein, 64 aa, Homo sapiens; identical to SEQ ID NO: 205
  SITE 14: note = Phosphorylated residue
  SITE 26: note = Phosphorylated residue

SEQ ID NO: 1662 - protein, 23 aa, Homo sapiens
  SITE 9: note = Phosphorylated residue
  SITE 16: note = Phosphorylated residue
RMKQPPATTPPFKTHCQEAETKT

SEQ ID NO: 1663 - protein, 29 aa, Homo sapiens
  SITE 5: note = Phosphorylated residue
  SITE 11: note = Phosphorylated residue
  SITE 15: note = Phosphorylated residue
KQTLSAAAVFNDRLCVGIVASERAGVGKS

SEQ ID NO: 1664 - protein, 64 aa, Homo sapiens; identical to SEQ ID NO: 205
  SITE 26: note = Phosphorylated residue
  SITE 37: note = Phosphorylated residue

SEQ ID NO: 1665 - protein, 40 aa, Homo sapiens
  SITE 16: note = Phosphorylated residue
  SITE 22: note = Phosphorylated residue
  SITE 30: note = Phosphorylated residue
  SITE 32: note = Phosphorylated residue
KPSPQAWLQLVKNLSMPLELICSDEHMQGSGSLAQAVIRE

SEQ ID NO: 1666 - protein, 23 aa, Homo sapiens
  SITE 2: note = Phosphorylated residue
  SITE 16: note = Phosphorylated residue
RMKQPPATTPPFKTHCQEAETKT

SEQ ID NO: 1667 - protein, 22 aa, Homo sapiens
  SITE 4: note = Phosphorylated residue
  SITE 15: note = Phosphorylated residue
KTHCQEAETKTKDEMAAAEEKV

SEQ ID NO: 1668 - protein, 23 aa, Homo sapiens
  SITE 2: note = Phosphorylated residue
  SITE 16: note = Phosphorylated residue
RMKQPPATTPPFKTHCQEAETKT

SEQ ID NO: 1669 - protein, 23 aa, Homo sapiens
  SITE 2: note = Phosphorylated residue
  SITE 16: note = Phosphorylated residue
RMKQPPATTPPFKTHCQEAETKT

SEQ ID NO: 1670 - protein, 23 aa, Homo sapiens
  SITE 2: note = Phosphorylated residue
  SITE 16: note = Phosphorylated residue
RMKQPPATTPPFKTHCQEAETKT

SEQ ID NO: 1671 - protein, 14 aa, Homo sapiens
  SITE 2: note = Phosphorylated residue
  SITE 9: note = Phosphorylated residue
KCSEEVSPMQLIKQ

SEQ ID NO: 1672 - protein, 23 aa, Homo sapiens
  SITE 2: note = Phosphorylated residue
  SITE 16: note = Phosphorylated residue
RMKQPPATTPPFKTHCQEAETKT

SEQ ID NO: 1673 - protein, 23 aa, Homo sapiens
  SITE 2: note = Phosphorylated residue
  SITE 16: note = Phosphorylated residue
RMKQPPATTPPFKTHCQEAETKT

SEQ ID NO: 1674 - protein, 22 aa, Homo sapiens
  SITE 4: note = Phosphorylated residue
  SITE 15: note = Phosphorylated residue
KTHCQEAETKTKDEMAAAEEKV

SEQ ID NO: 1675 - protein, 23 aa, Homo sapiens
  SITE 2: note = Phosphorylated residue
  SITE 16: note = Phosphorylated residue
RMKQPPATTPPFKTHCQEAETKT

SEQ ID NO: 1676 - protein, 23 aa, Homo sapiens
  SITE 2: note = Phosphorylated residue
  SITE 16: note = Phosphorylated residue
RMKQPPATTPPFKTHCQEAETKT

SEQ ID NO: 1677 - protein, 48 aa, Homo sapiens
  SITE 25: note = Phosphorylated residue
  SITE 28: note = Phosphorylated residue
  SITE 35: note = Phosphorylated residue
  SITE 37: note = Phosphorylated residue
  SITE 38: note = Phosphorylated residue
RILTIYPQVLHSLMEARWNHELAGCEMTLDAFAAMACTEMLTRNTLKP

SEQ ID NO: 1678 - protein, 22 aa, Homo sapiens
  SITE 14: note = Phosphorylated residue
  SITE 15: note = Phosphorylated residue
RTYTWLGALPVLHCCMELAPRH

SEQ ID NO: 1679 - protein, 21 aa, Homo sapiens
  SITE 3: note = Phosphorylated residue
  SITE 18: note = Phosphorylated residue
RSCVQSAVGMLRDQNESCTRN

SEQ ID NO: 1680 - protein, 21 aa, Homo sapiens
  SITE 3: note = Phosphorylated residue
  SITE 18: note = Phosphorylated residue
RSCVQSAVGMLRDQNESCTRN

SEQ ID NO: 1681 - protein, 32 aa, Homo sapiens
  SITE 11: note = Phosphorylated residue
  SITE 14: note = Phosphorylated residue
RAWFASEQMICPYCLTALPDEFSPAVSQAHRE

SEQ ID NO: 1682 - protein, 32 aa, Homo sapiens; identical to SEQ ID NO: 1681
  SITE 11: note = Phosphorylated residue
  SITE 14: note = Phosphorylated residue

SEQ ID NO: 1683 - protein, 12 aa, Homo sapiens
  SITE 4: note = Phosphorylated residue
KSNCTLRDVLRA

SEQ ID NO: 1684 - protein, 12 aa, Homo sapiens
  SITE 4: note = Phosphorylated residue
KSNCTLRDVLRA

SEQ ID NO: 1685 - protein, 20 aa, Homo sapiens
  SITE 14: note = Phosphorylated residue
RSHNASLHPTPEQCEAVSKF

SEQ ID NO: 1686 - protein, 26 aa, Homo sapiens
  SITE 15: note = Phosphorylated residue
KMPLKTLHPLLEDGCIEDDPAPHKKV

SEQ ID NO: 1687 - protein, 21 aa, Homo sapiens
  SITE 14: note = Phosphorylated residue
KQPPATTPPFKTHCQEAETKT

SEQ ID NO: 1688 - protein, 28 aa, Homo sapiens
  SITE 13: note = Phosphorylated residue
RSLKQVHLVSFQCSPHSTPQGIISTFRQ

SEQ ID NO: 1689 - protein, 28 aa, Homo sapiens
  SITE 10: note = Phosphorylated residue
KSLSPQDEQCAVEEALDWRREELLLLKK

SEQ ID NO: 1690 - protein, 22 aa, Homo sapiens
  SITE 4: note = Phosphorylated residue
KTHCQEAETKTKDEMAAAEEKV

SEQ ID NO: 1691 - protein, 20 aa, Homo sapiens
  SITE 4: note = Phosphorylated residue
KVTCRPPKEVIDMELSALRS

SEQ ID NO: 1692 - protein, 21 aa, Homo sapiens
  SITE 11: note = Phosphorylated residue
RIGELKSGDACIAEYQQAGRG

SEQ ID NO: 1693 - protein, 11 aa, Homo sapiens
  SITE 9: note = Phosphorylated residue
KDQEYTQLCRN

SEQ ID NO: 1694 - protein, 20 aa, Homo sapiens
  SITE 4: note = Phosphorylated residue
KVTCRPPKEVIDMELSALRS

SEQ ID NO: 1695 - protein, 16 aa, Homo sapiens
  SITE 7: note = Phosphorylated residue
KSILLNCATPDAVVRL

SEQ ID NO: 1696 - protein, 9 aa, Homo sapiens
  SITE 5: note = Phosphorylated residue
RIRLCLDRA

SEQ ID NO: 1697 - protein, 22 aa, Homo sapiens
  SITE 4: note = Phosphorylated residue
KTHCQEAETKTKDEMAAAEEKV

SEQ ID NO: 1698 - protein, 16 aa, Homo sapiens
  SITE 6: note = Phosphorylated residue
KSGDACIAEYQQAGRG

SEQ ID NO: 1699 - protein, 16 aa, Homo sapiens
  SITE 6: note = Phosphorylated residue
KSGDACIAEYQQAGRG

SEQ ID NO: 1700 - protein, 25 aa, Homo sapiens
  SITE 10: note = Phosphorylated residue
KQVHLVSFQCSPHSTPQGIISTFRQ

SEQ ID NO: 1701 - protein, 14 aa, Homo sapiens
  SITE 7: note = Phosphorylated residue
KWDSNICELHYTRD

SEQ ID NO: 1702 - protein, 26 aa, Homo sapiens
  SITE 15: note = Phosphorylated residue
KMPLKTLHPLLEDGCIEDDPAPHKKV

SEQ ID NO: 1703 - protein, 9 aa, Homo sapiens
  SITE 2: note = Phosphorylated residue
RCVDSLLKM

SEQ ID NO: 1704 - protein, 14 aa, Homo sapiens
  SITE 10: note = Phosphorylated residue
KSTDFLPVDCPVRS

SEQ ID NO: 1705 - protein, 14 aa, Homo sapiens
  SITE 10: note = Phosphorylated residue
KSTDFLPVDCPVRS

SEQ ID NO: 1706 - protein, 9 aa, Homo sapiens
  SITE 2: note = Phosphorylated residue
RCVDSLLKM

SEQ ID NO: 1707 - protein, 16 aa, Homo sapiens
  SITE 7: note = Phosphorylated residue
KSILLNCATPDAVVRL

SEQ ID NO: 1708 - protein, 28 aa, Homo sapiens
  SITE 13: note = Phosphorylated residue
RSLKQVHLVSFQCSPHSTPQGIISTFRQ

SEQ ID NO: 1709 - protein, 14 aa, Homo sapiens
  SITE 7: note = Phosphorylated residue
KWDSNICELHYTRD

SEQ ID NO: 1710 - protein, 20 aa, Homo sapiens
  SITE 14: note = Phosphorylated residue
RSHNASLHPTPEQCEAVSKF

SEQ ID NO: 1711 - protein, 19 aa, Homo sapiens
  SITE 6: note = Phosphorylated residue
KSGDACIAEYQQAGRGSRG

SEQ ID NO: 1712 - protein, 26 aa, Homo sapiens
  SITE 15: note = Phosphorylated residue
KMPLKTLHPLLEDGCIEDDPAPHKKV

SEQ ID NO: 1713 - protein, 13 aa, Homo sapiens
  SITE 3: note = Phosphorylated residue
RSCVQSAVGMLRD

SEQ ID NO: 1714 - protein, 13 aa, Homo sapiens
  SITE 3: note = Phosphorylated residue
RSCVQSAVGMLRD

SEQ ID NO: 1715 - protein, 17 aa, Homo sapiens
  SITE 6: note = Phosphorylated residue
RGLGLCATALVSYLIRL

SEQ ID NO: 1716 - protein, 23 aa, Homo sapiens
  SITE 16: note = Phosphorylated residue
RGGEEFGESKWDSNICELHYTRD

SEQ ID NO: 1717 - protein, 14 aa, Homo sapiens
  SITE 2: note = Phosphorylated residue
KCSEEVSPMQLIKQ

SEQ ID NO: 1718 - protein, 19 aa, Homo sapiens
  SITE 14: note = Phosphorylated residue
RNNTEVERFSEVFCSVQRL

SEQ ID NO: 1719 - protein, 14 aa, Homo sapiens
  SITE 2: note = Phosphorylated residue
KCSEEVSPMQLIKQ

SEQ ID NO: 1720 - protein, 33 aa, Homo sapiens; identical to SEQ ID NO: 286
  SITE 16: note = Phosphorylated residue

SEQ ID NO: 1721 - protein, 22 aa, Homo sapiens
  SITE 13: note = Phosphorylated residue
KVSEEAKSILLNCATPDAVVRL

SEQ ID NO: 1722 - protein, 21 aa, Homo sapiens
  SITE 11: note = Phosphorylated residue
RIGELKSGDACIAEYQQAGRG

SEQ ID NO: 1723 - protein, 22 aa, Homo sapiens
  SITE 11: note = Phosphorylated residue
KTLHPLLEDGCIEDDPAPHKKV

SEQ ID NO: 1724 - protein, 20 aa, Homo sapiens
  SITE 3: note = Phosphorylated residue
RLCGTDEKILANVTEDAKRL

SEQ ID NO: 1725 - protein, 23 aa, Homo sapiens
  SITE 16: note = Phosphorylated residue
RMKQPPATTPPFKTHCQEAETKT

SEQ ID NO: 1726 - protein, 13 aa, Homo sapiens
  SITE 6: note = Phosphorylated residue
KAVLECKPLGIKT

SEQ ID NO: 1727 - protein, 22 aa, Homo sapiens
  SITE 15: note = Phosphorylated residue
RVVLLLGLLNEDDACHASFLRV

SEQ ID NO: 1728 - protein, 13 aa, Homo sapiens
  SITE 6: note = Phosphorylated residue
KAVLECKPLGIKT

SEQ ID NO: 1729 - protein, 20 aa, Homo sapiens
  SITE 10: note = Phosphorylated residue
KSLSPQDEQCAVEEALDWRR

SEQ ID NO: 1730 - protein, 23 aa, Homo sapiens
  SITE 16: note = Phosphorylated residue
RMKQPPATTPPFKTHCQEAETKT

SEQ ID NO: 1731 - protein, 20 aa, Homo sapiens
  SITE 3: note = Phosphorylated residue
RLCGTDEKILANVTEDAKRL

SEQ ID NO: 1732 - protein, 40 aa, Homo sapiens; identical to SEQ ID NO: 301
  SITE 38: note = Phosphorylated residue

SEQ ID NO: 1733 - protein, 23 aa, Homo sapiens
  SITE 16: note = Phosphorylated residue
RMKQPPATTPPFKTHCQEAETKT

SEQ ID NO: 1734 - protein, 28 aa, Homo sapiens
  SITE 22: note = Phosphorylated residue
KESEILPEMASQFPEEILLASCVSVWKT

SEQ ID NO: 1735 - protein, 26 aa, Homo sapiens
  SITE 15: note = Phosphorylated residue
KMPLKTLHPLLEDGCIEDDPAPHKKV

SEQ ID NO: 1736 - protein, 23 aa, Homo sapiens
  SITE 16: note = Phosphorylated residue
RMKQPPATTPPFKTHCQEAETKT

SEQ ID NO: 1737 - protein, 27 aa, Homo sapiens
  SITE 17: note = Phosphorylated residue
RGSPNETELIESAKGICSSDILVQDRV

SEQ ID NO: 1738 - protein, 28 aa, Homo sapiens
  SITE 22: note = Phosphorylated residue
KESEILPEMASQFPEEILLASCVSVWKT

SEQ ID NO: 1739 - protein, 17 aa, Homo sapiens
  SITE 4: note = Phosphorylated residue
REACNQDALQEAGTFRH

SEQ ID NO: 1740 - protein, 27 aa, Homo sapiens
  SITE 14: note = Phosphorylated residue
RSDTEPGMDLWEFCSETFQRPYQYLRR

SEQ ID NO: 1741 - protein, 22 aa, Homo sapiens
  SITE 4: note = Phosphorylated residue
KTHCQEAETKTKDEMAAAEEKV

SEQ ID NO: 1742 - protein, 16 aa, Homo sapiens
  SITE 7: note = Phosphorylated residue
KSILLNCATPDAVVRL

SEQ ID NO: 1743 - protein, 22 aa, Homo sapiens
  SITE 11: note = Phosphorylated residue
KTLHPLLEDGCIEDDPAPHKKV

SEQ ID NO: 1744 - protein, 40 aa, Homo sapiens; identical to SEQ ID NO: 301
  SITE 38: note = Phosphorylated residue

SEQ ID NO: 1745 - protein, 22 aa, Homo sapiens
  SITE 11: note = Phosphorylated residue
KTLHPLLEDGCIEDDPAPHKKV

SEQ ID NO: 1746 - protein, 16 aa, Homo sapiens
  SITE 6: note = Phosphorylated residue
KSGDACIAEYQQAGRG

SEQ ID NO: 1747 - protein, 20 aa, Homo sapiens
  SITE 14: note = Phosphorylated residue
RSHNASLHPTPEQCEAVSKF

SEQ ID NO: 1748 - protein, 28 aa, Homo sapiens
  SITE 3: note = Phosphorylated residue
RLCLTLGIPQATDPDKTYELTTDNMLKI

SEQ ID NO: 1749 - protein, 20 aa, Homo sapiens
  SITE 14: note = Phosphorylated residue
RSHNASLHPTPEQCEAVSKF

SEQ ID NO: 1750 - protein, 27 aa, Homo sapiens
  SITE 14: note = Phosphorylated residue
RSDTEPGMDLWEFCSETFQRPYQYLRR

SEQ ID NO: 1751 - protein, 28 aa, Homo sapiens
  SITE 13: note = Phosphorylated residue
RSLKQVHLVSFQCSPHSTPQGIISTFRQ

SEQ ID NO: 1752 - protein, 33 aa, Homo sapiens; identical to SEQ ID NO: 286
  SITE 16: note = Phosphorylated residue

SEQ ID NO: 1753 - protein, 22 aa, Homo sapiens
  SITE 4: note = Phosphorylated residue
KTHCQEAETKTKDEMAAAEEKV

SEQ ID NO: 1754 - protein, 22 aa, Homo sapiens
  SITE 11: note = Phosphorylated residue
KTLHPLLEDGCIEDDPAPHKKV

SEQ ID NO: 1755 - protein, 40 aa, Homo sapiens; identical to SEQ ID NO: 301
  SITE 38: note = Phosphorylated residue

SEQ ID NO: 1756 - protein, 15 aa, Homo sapiens
KVHGGTTADMIYSRV

SEQ ID NO: 1757 - protein, 11 aa, Homo sapiens
KPLGIKTALKA

SEQ ID NO: 1758 - protein, 19 aa, Homo sapiens
KASNRKPSPQDIAQAVLRN

SEQ ID NO: 1759 - protein, 11 aa, Homo sapiens
KILSPPDISRF

SEQ ID NO: 1760 - protein, 17 aa, Homo sapiens
KKQEESQFHPLEWLARE

SEQ ID NO: 1761 - protein, 24 aa, Homo sapiens
RNFSGKDDIQALDIFLANLPEAKC

SEQ ID NO: 1762 - protein, 14 aa, Homo sapiens
RLLQEQHQLSSRRL

SEQ ID NO: 1763 - protein, 10 aa, Homo sapiens
RREELLLLKK

SEQ ID NO: 1764 - protein, 28 aa, Homo sapiens
KGGQKISPDTVLHLILPESPGSHEESRE

SEQ ID NO: 1765 - protein, 24 aa, Homo sapiens
RNFSGKDDIQALDIFLANLPEAKC

SEQ ID NO: 1766 - protein, 8 aa, Homo sapiens
RNLEWLKT

SEQ ID NO: 1767 - protein, 11 aa, Homo sapiens
KILSPPDISRF

SEQ ID NO: 1768 - protein, 25 aa, Homo sapiens
KGIPTLVYRHDWNYEHLFMDIKNKM

SEQ ID NO: 1769 - protein, 14 aa, Homo sapiens
RVPFNVDFDKLPRH

SEQ ID NO: 1770 - protein, 22 aa, Homo sapiens
KVGKETSELGGSDVSILDTTRL

SEQ ID NO: 1771 - protein, 8 aa, Homo sapiens
RNLEWLKT

SEQ ID NO: 1772 - protein, 14 aa, Homo sapiens
KRLIAVADSVLTKV

SEQ ID NO: 1773 - protein, 9 aa, Homo sapiens
RFLNYQLRD

SEQ ID NO: 1774 - protein, 16 aa, Homo sapiens
RTRVPQFSFLDIFPKV

SEQ ID NO: 1775 - protein, 17 aa, Homo sapiens
KIRENEDRIFVYFITKL

SEQ ID NO: 1776 - protein, 12 aa, Homo sapiens
RFFPKPYDDSRL

SEQ ID NO: 1777 - protein, 11 aa, Homo sapiens
RDGFHLVKDKA

SEQ ID NO: 1778 - protein, 17 aa, Homo sapiens
KKQEESQFHPLEWLARE

SEQ ID NO: 1779 - protein, 14 aa, Homo sapiens
RSAEKLQLPPLERL

SEQ ID NO: 1780 - protein, 9 aa, Homo sapiens
KAFITEDKT

SEQ ID NO: 1781 - protein, 9 aa, Homo sapiens
KFLSDLRRG

SEQ ID NO: 1782 - protein, 25 aa, Homo sapiens
KILSPPDISRFATSLVDNSVPLLRA

SEQ ID NO: 1783 - protein, 20 aa, Homo sapiens
KDVVKQQGLRQDHPGQMDRY

SEQ ID NO: 1784 - protein, 21 aa, Homo sapiens
KVPGGEQEDAESRYLLVLTKN

SEQ ID NO: 1785 - protein, 11 aa, Homo sapiens
RYLVYGDEYKA

SEQ ID NO: 1786 - protein, 20 aa, Homo sapiens
RFRPQWSLRDTLVSYMQTKE

SEQ ID NO: 1787 - protein, 14 aa, Homo sapiens
RRLLNFDTELSTKE

SEQ ID NO: 1788 - protein, 14 aa, Homo sapiens
RSSLTLATAINQRG

SEQ ID NO: 1789 - protein, 13 aa, Homo sapiens
RLLNFDTELSTKE

SEQ ID NO: 1790 - protein, 19 aa, Homo sapiens
KASNRKPSPQDIAQAVLRN

SEQ ID NO: 1791 - protein, 20 aa, Homo sapiens
KTIVADAMQGPAAYSDLFRS

SEQ ID NO: 1792 - protein, 14 aa, Homo sapiens
RVKWPNDLYLQDRK

SEQ ID NO: 1793 - protein, 22 aa, Homo sapiens
RELRAALELFEQEGLAPYLPRW

SEQ ID NO: 1794 - protein, 15 aa, Homo sapiens
KVHGGTTADMIYSRV

SEQ ID NO: 1795 - protein, 15 aa, Homo sapiens
KVHGGTTADMIYSRV

SEQ ID NO: 1796 - protein, 25 aa, Homo sapiens
RAAINKHIQTLRDWGVDVFTVPGKG

SEQ ID NO: 1797 - protein, 23 aa, Homo sapiens
RGMEFVQGLSKPGRPHQWVFPKD

SEQ ID NO: 1798 - protein, 9 aa, Homo sapiens
KILAIEMRF

SEQ ID NO: 1799 - protein, 13 aa, Homo sapiens
RLLNFDTELSTKE

SEQ ID NO: 1800 - protein, 56 aa, Homo sapiens; identical to SEQ ID NO: 22

SEQ ID NO: 1801 - protein, 12 aa, Homo sapiens
RSTLMVSDVTRL

SEQ ID NO: 1802 - protein, 16 aa, Homo sapiens
RTRVPQFSFLDIFPKV

SEQ ID NO: 1803 - protein, 29 aa, Homo sapiens
RGIDKQGALLLEQDGVIKPWMGGEISLRS

SEQ ID NO: 1804 - protein, 10 aa, Homo sapiens
RIIMEQSMRC

SEQ ID NO: 1805 - protein, 18 aa, Homo sapiens
KGFLQQHILKDLEQLAKM

SEQ ID NO: 1806 - protein, 9 aa, Homo sapiens
RLIVIEEKD

SEQ ID NO: 1807 - protein, 24 aa, Homo sapiens
RNFSGKDDIQALDIFLANLPEAKC

SEQ ID NO: 1808 - protein, 16 aa, Homo sapiens
KGYSLPEPIPLLNAKQ

SEQ ID NO: 1809 - protein, 11 aa, Homo sapiens
KLYIQQIVQRL

SEQ ID NO: 1810 - protein, 20 aa, Homo sapiens
KHIQTLRDWGVDVFTVPGKG

SEQ ID NO: 1811 - protein, 22 aa, Homo sapiens
RAALELFEQEGLAPYLPRWEKL

SEQ ID NO: 1812 - protein, 8 aa, Homo sapiens
RNLEWLKT

SEQ ID NO: 1813 - protein, 17 aa, Homo sapiens
RVPILWHFLQKEAELRL

SEQ ID NO: 1814 - protein, 17 aa, Homo sapiens
RALTEELHQKVSEEAKS

SEQ ID NO: 1815 - protein, 16 aa, Homo sapiens
RFATSLVDNSVPLLRA

SEQ ID NO: 1816 - protein, 44 aa, Homo sapiens; identical to SEQ ID NO: 34

SEQ ID NO: 1817 - protein, 21 aa, Homo sapiens
RGLSQEGTGPPTSAGEGHSRT

SEQ ID NO: 1818 - protein, 15 aa, Homo sapiens
KLIIGDKEIFGISRG

SEQ ID NO: 1819 - protein, 16 aa, Homo sapiens
RLHNEIVYAVEKLSKE

SEQ ID NO: 1820 - protein, 11 aa, Homo sapiens
KEPFGEISSRY

SEQ ID NO: 1821 - protein, 26 aa, Homo sapiens
KVFVTPQAPLEAIQAYLAGHYRVPKQ

SEQ ID NO: 1822 - protein, 26 aa, Homo sapiens
KLIALLANGEFHSGEQLGETLGMSRA

SEQ ID NO: 1823 - protein, 15 aa, Homo sapiens
KVHGGTTADMIYSRV

SEQ ID NO: 1824 - protein, 13 aa, Homo sapiens
RLLQEQHQLSSRR

SEQ ID NO: 1825 - protein, 18 aa, Homo sapiens
RATHYHLSSQVQEMAGKI

SEQ ID NO: 1826 - protein, 11 aa, Homo sapiens
KEPFGEISSRY

SEQ ID NO: 1827 - protein, 26 aa, Homo sapiens
KVFVTPQAPLEAIQAYLAGHYRVPKQ

SEQ ID NO: 1828 - protein, 20 aa, Homo sapiens
KHIQTLRDWGVDVFTVPGKG

SEQ ID NO: 1829 - protein, 25 aa, Homo sapiens
RAAINKHIQTLRDWGVDVFTVPGKG

SEQ ID NO: 1830 - protein, 37 aa, Homo sapiens; identical to SEQ ID NO: 408

SEQ ID NO: 1831 - protein, 24 aa, Homo sapiens
RNFSGKDDIQALDIFLANLPEAKC

SEQ ID NO: 1832 - protein, 14 aa, Homo sapiens
RLHKEPFGEISSRY

SEQ ID NO: 1833 - protein, 29 aa, Homo sapiens
RGIDKQGALLLEQDGVIKPWMGGEISLRS

SEQ ID NO: 1834 - protein, 11 aa, Homo sapiens
KRYLWQHLKKH

SEQ ID NO: 1835 - protein, 11 aa, Homo sapiens
RYLVYGDEYKA

SEQ ID NO: 1836 - protein, 29 aa, Homo sapiens
RGIDKQGALLLEQDGVIKPWMGGEISLRS

SEQ ID NO: 1837 - protein, 37 aa, Homo sapiens; identical to SEQ ID NO: 408

SEQ ID NO: 1838 - protein, 10 aa, Homo sapiens
RISSNPVAKI

SEQ ID NO: 1839 - protein, 21 aa, Homo sapiens
KVPGGEQEDAESRYLLVLTKN

SEQ ID NO: 1840 - protein, 9 aa, Homo sapiens
KAFITEDKT

SEQ ID NO: 1841 - protein, 12 aa, Homo sapiens
KFLPEILALQRD

SEQ ID NO: 1842 - protein, 26 aa, Homo sapiens
RKLKAASEAPEEEVSLPWVHLAYQRF

SEQ ID NO: 1843 - protein, 20 aa, Homo sapiens
RFRPQWSLRDTLVSYMQTKE

SEQ ID NO: 1844 - protein, 21 aa, Homo sapiens
KHMVTMDGVREEDLAPFSLRK

SEQ ID NO: 1845 - protein, 29 aa, Homo sapiens
RGIDKQGALLLEQDGVIKPWMGGEISLRS

SEQ ID NO: 1846 - protein, 44 aa, Homo sapiens; identical to SEQ ID NO: 34

SEQ ID NO: 1847 - protein, 14 aa, Homo sapiens
RVPQFSFLDIFPKV

SEQ ID NO: 1848 - protein, 56 aa, Homo sapiens; identical to SEQ ID NO: 22

SEQ ID NO: 1849 - protein, 10 aa, Homo sapiens
RYLWQHLKKH

SEQ ID NO: 1850 - protein, 19 aa, Homo sapiens
KASNRKPSPQDIAQAVLRN

SEQ ID NO: 1851 - protein, 22 aa, Homo sapiens
KVGKETSELGGSDVSILDTTRL

SEQ ID NO: 1852 - protein, 9 aa, Homo sapiens
RFLNYQLRD

SEQ ID NO: 1853 - protein, 36 aa, Homo sapiens; identical to SEQ ID NO: 745

SEQ ID NO: 1854 - protein, 15 aa, Homo sapiens
KHLIQVDFGVLAVRH

SEQ ID NO: 1855 - protein, 38 aa, Homo sapiens; identical to SEQ ID NO: 169

SEQ ID NO: 1856 - protein, 15 aa, Homo sapiens
KKFVDIFQQTPLGRF

SEQ ID NO: 1857 - protein, 11 aa, Homo sapiens
RLESAGLGYRV

SEQ ID NO: 1858 - protein, 17 aa, Homo sapiens
RNTLKPSPQAWLQLVKN

SEQ ID NO: 1859 - protein, 25 aa, Homo sapiens
KIKDYLEELWVQAQYITDAEGLPKK

SEQ ID NO: 1860 - protein, 16 aa, Homo sapiens
REKQHLLSIDEPLFRS

SEQ ID NO: 1861 - protein, 29 aa, Homo sapiens
RFQQGKDLQQYVSVVVLDEVGLAEDSPKM

SEQ ID NO: 1862 - protein, 12 aa, Homo sapiens
RVQGYFASFAKA

SEQ ID NO: 1863 - protein, 37 aa, Homo sapiens; identical to SEQ ID NO: 408

SEQ ID NO: 1864 - protein, 15 aa, Homo sapiens
RWEKLDNFINRPVKL

SEQ ID NO: 1865 - protein, 13 aa, Homo sapiens
RLLNFDTELSTKE

SEQ ID NO: 1866 - protein, 16 aa, Homo sapiens
RETLDQINQELIQAKK

SEQ ID NO: 1867 - protein, 12 aa, Homo sapiens
RFFPKPYDDSRL

SEQ ID NO: 1868 - protein, 16 aa, Homo sapiens
RTRVPQFSFLDIFPKV

SEQ ID NO: 1869 - protein, 10 aa, Homo sapiens
RIIMEQSMRC

SEQ ID NO: 1870 - protein, 15 aa, Homo sapiens
KVHGGTTADMIYSRV

SEQ ID NO: 1871 - protein, 14 aa, Homo sapiens
KQTLSAAAVFNDRL

SEQ ID NO: 1872 - protein, 14 aa, Homo sapiens
RLHKEPFGEISSRY

SEQ ID NO: 1873 - protein, 13 aa, Homo sapiens
RDWIKDRVEQIKE

SEQ ID NO: 1874 - protein, 24 aa, Homo sapiens
RNFSGKDDIQALDIFLANLPEAKC

SEQ ID NO: 1875 - protein, 37 aa, Homo sapiens; identical to SEQ ID NO: 408

SEQ ID NO: 1876 - protein, 17 aa, Homo sapiens
KKQEESQFHPLEWLARE

SEQ ID NO: 1877 - protein, 20 aa, Homo sapiens
KDVVKQQGLRQDHPGQMDRY

SEQ ID NO: 1878 - protein, 9 aa, Homo sapiens
REVAILYRS

SEQ ID NO: 1879 - protein, 12 aa, Homo sapiens
KKLLQDISEARC

SEQ ID NO: 1880 - protein, 25 aa, Homo sapiens
KQQGLRQDHPGQMDRYLVYGDEYKA

SEQ ID NO: 1881 - protein, 9 aa, Homo sapiens
RFLNYQLRD

SEQ ID NO: 1882 - protein, 15 aa, Homo sapiens
RLVEIQFPAEHGWKE

SEQ ID NO: 1883 - protein, 22 aa, Homo sapiens
KHMVTMDGVREEDLAPFSLRKR

SEQ ID NO: 1884 - protein, 28 aa, Homo sapiens
RDWGVDVFTVPGKGYSLPEPIPLLNAKQ

SEQ ID NO: 1885 - protein, 46 aa, Homo sapiens
RKRWESEPHPYVFFNDDHTTMTFIGFHLQPNINGSVDAISHLTGKV

SEQ ID NO: 1886 - protein, 24 aa, Homo sapiens
RNFSGKDDIQALDIFLANLPEAKC

SEQ ID NO: 1887 - protein, 20 aa, Homo sapiens
KHIQTLRDWGVDVFTVPGKG

SEQ ID NO: 1888 - protein, 12 aa, Homo sapiens
RFFPKPYDDSRL

SEQ ID NO: 1889 - protein, 29 aa, Homo sapiens
RGIDKQGALLLEQDGVIKPWMGGEISLRS

SEQ ID NO: 1890 - protein, 15 aa, Homo sapiens
RGSPNETELIESAKG

SEQ ID NO: 1891 - protein, 38 aa, Homo sapiens; identical to SEQ ID NO: 169

SEQ ID NO: 1892 - protein, 20 aa, Homo sapiens
RVEQIKEYHHLHQAVHAAKV

SEQ ID NO: 1893 - protein, 25 aa, Homo sapiens
KQQGLRQDHPGQMDRYLVYGDEYKA

SEQ ID NO: 1894 - protein, 24 aa, Homo sapiens
RNFSGKDDIQALDIFLANLPEAKC

SEQ ID NO: 1895 - protein, 11 aa, Homo sapiens
KILSPPDISRF

SEQ ID NO: 1896 - protein, 26 aa, Homo sapiens
RVHALPPSLIPLVWDFGQLSDVAEKL

SEQ ID NO: 1897 - protein, 12 aa, Homo sapiens
RKFIKLHQDLKS

SEQ ID NO: 1898 - protein, 20 aa, Homo sapiens
RFRPQWSLRDTLVSYMQTKE

SEQ ID NO: 1899 - protein, 29 aa, Homo sapiens
KQILGQLDGGSVAVLPVVDSTNQYLLDRI

SEQ ID NO: 1900 - protein, 16 aa, Homo sapiens
KTLPTMNNLISQDKRI

SEQ ID NO: 1901 - protein, 11 aa, Homo sapiens
KILSPPDISRF

SEQ ID NO: 1902 - protein, 14 aa, Homo sapiens
RSSLTLATAINQRG

SEQ ID NO: 1903 - protein, 15 aa, Homo sapiens
RWEKLDNFINRPVKL

SEQ ID NO: 1904 - protein, 11 aa, Homo sapiens
KFIKLHQDLKS

SEQ ID NO: 1905 - protein, 10 aa, Homo sapiens
KLQLPPLERL

SEQ ID NO: 1906 - protein, 9 aa, Homo sapiens
RFLNYQLRD

SEQ ID NO: 1907 - protein, 12 aa, Homo sapiens
RFFPKPYDDSRL

SEQ ID NO: 1908 - protein, 12 aa, Homo sapiens
RITVFLSTWNKL

SEQ ID NO: 1909 - protein, 17 aa, Homo sapiens
KQPPSDAALTMLSFIKS

SEQ ID NO: 1910 - protein, 11 aa, Homo sapiens
RGIYVIQAPKG

SEQ ID NO: 1911 - protein, 25 aa, Homo sapiens
KQQGLRQDHPGQMDRYLVYGDEYKA

SEQ ID NO: 1912 - protein, 10 aa, Homo sapiens
KGIPTLVYRH

SEQ ID NO: 1913 - protein, 16 aa, Homo sapiens
RTRVPQFSFLDIFPKV

SEQ ID NO: 1914 - protein, 19 aa, Homo sapiens
RAALELFEQEGLAPYLPRW

SEQ ID NO: 1915 - protein, 10 aa, Homo sapiens
RIIMEQSMRC

SEQ ID NO: 1916 - protein, 9 aa, Homo sapiens
KFLSDLRRG

SEQ ID NO: 1917 - protein, 27 aa, Homo sapiens
RLSTSSNSQRATHYHLSSQVQEMAGKI

SEQ ID NO: 1918 - protein, 15 aa, Homo sapiens
RHDWNYEHLFMDIKN

SEQ ID NO: 1919 - protein, 15 aa, Homo sapiens
RKPSPQDIAQAVLRN

SEQ ID NO: 1920 - protein, 48 aa, Homo sapiens; identical to SEQ ID NO: 18

SEQ ID NO: 1921 - protein, 25 aa, Homo sapiens
RAAINKHIQTLRDWGVDVFTVPGKG

SEQ ID NO: 1922 - protein, 14 aa, Homo sapiens
RLLQEQHQLSSRRL

SEQ ID NO: 1923 - protein, 23 aa, Homo sapiens
RLSVFLKKQEESQFHPLEWLARE

SEQ ID NO: 1924 - protein, 16 aa, Homo sapiens
RLHNEIVYAVEKLSKE

SEQ ID NO: 1925 - protein, 23 aa, Homo sapiens
RGMEFVQGLSKPGRPHQWVFPKD

SEQ ID NO: 1926 - protein, 14 aa, Homo sapiens
RVREAENVAFANKD

SEQ ID NO: 1927 - protein, 17 aa, Homo sapiens
KQPPSDAALTMLSFIKS

SEQ ID NO: 1928 - protein, 25 aa, Homo sapiens
KQGALLLEQDGVIKPWMGGEISLRS

SEQ ID NO: 1929 - protein, 29 aa, Homo sapiens
KQILGQLDGGSVAVLPVVDSTNQYLLDRI

SEQ ID NO: 1930 - protein, 14 aa, Homo sapiens
RHAIFTEITTFSRL

SEQ ID NO: 1931 - protein, 12 aa, Homo sapiens
KLDNFINRPVKL

SEQ ID NO: 1932 - protein, 18 aa, Homo sapiens
RENSDVKTHGPFEAVMRT

SEQ ID NO: 1933 - protein, 15 aa, Homo sapiens
RVKWPNDLYLQDRKL

SEQ ID NO: 1934 - protein, 14 aa, Homo sapiens
RLHKEPFGEISSRY

SEQ ID NO: 1935 - protein, 12 aa, Homo sapiens
RFFPKPYDDSRL

SEQ ID NO: 1936 - protein, 20 aa, Homo sapiens
RQPEDTWAALEGLSFSPFRE

SEQ ID NO: 1937 - protein, 20 aa, Homo sapiens
RGREPANEASVEYLQEVARI

SEQ ID NO: 1938 - protein, 9 aa, Homo sapiens
RLIVIEEKD

SEQ ID NO: 1939 - protein, 37 aa, Homo sapiens; identical to SEQ ID NO: 408

SEQ ID NO: 1940 - protein, 16 aa, Homo sapiens
KTLPTMNNLISQDKRI

SEQ ID NO: 1941 - protein, 9 aa, Homo sapiens
RFLNYQLRD

SEQ ID NO: 1942 - protein, 14 aa, Homo sapiens
RRLLNFDTELSTKE

SEQ ID NO: 1943 - protein, 12 aa, Homo sapiens
KASWTVQESKKK

SEQ ID NO: 1944 - protein, 15 aa, Homo sapiens
KVHGGTTADMIYSRV

SEQ ID NO: 1945 - protein, 17 aa, Homo sapiens
KKQEESQFHPLEWLARE

SEQ ID NO: 1946 - protein, 19 aa, Homo sapiens
KASNRKPSPQDIAQAVLRN

SEQ ID NO: 1947 - protein, 12 aa, Homo sapiens
RFFPKPYDDSRL

SEQ ID NO: 1948 - protein, 29 aa, Homo sapiens
RGIDKQGALLLEQDGVIKPWMGGEISLRS

SEQ ID NO: 1949 - protein, 34 aa, Homo sapiens; identical to SEQ ID NO: 40

SEQ ID NO: 1950 - protein, 9 aa, Homo sapiens
RYLLVLTKN

SEQ ID NO: 1951 - protein, 11 aa, Homo sapiens
KRLNDTVTVRL

SEQ ID NO: 1952 - protein, 15 aa, Homo sapiens
RGSPNETELIESAKG

SEQ ID NO: 1953 - protein, 20 aa, Homo sapiens
RVEQIKEYHHLHQAVHAAKV

SEQ ID NO: 1954 - protein, 23 aa, Homo sapiens
RLLLDEITRAQDLFLDGVPLRKT

SEQ ID NO: 1955 - protein, 12 aa, Homo sapiens
RKFIKLHQDLKS

SEQ ID NO: 1956 - protein, 9 aa, Homo sapiens
KFLSDLRRG

SEQ ID NO: 1957 - protein, 22 aa, Homo sapiens
KHMVTMDGVREEDLAPFSLRKR

SEQ ID NO: 1958 - protein, 20 aa, Homo sapiens
KDVVKQQGLRQDHPGQMDRY

SEQ ID NO: 1959 - protein, 13 aa, Homo sapiens
RLLNFDTELSTKE

SEQ ID NO: 1960 - protein, 20 aa, Homo sapiens
RGREPANEASVEYLQEVARI

SEQ ID NO: 1961 - protein, 15 aa, Homo sapiens
KVHGGTTADMIYSRV

SEQ ID NO: 1962 - protein, 22 aa, Homo sapiens
RVMEELPLMLLSEFSLVDKLRI

SEQ ID NO: 1963 - protein, 20 aa, Homo sapiens
KTIVADAMQGPAAYSDLFRS

SEQ ID NO: 1964 - protein, 10 aa, Homo sapiens
RIIMEQSMRC

SEQ ID NO: 1965 - protein, 10 aa, Homo sapiens
RIFVYFITKL

SEQ ID NO: 1966 - protein, 18 aa, Homo sapiens
KKVGFVGISNWALDPAKM

SEQ ID NO: 1967 - protein, 29 aa, Homo sapiens
RGIDKQGALLLEQDGVIKPWMGGEISLRS

SEQ ID NO: 1968 - protein, 14 aa, Homo sapiens
RDWGVDVFTVPGKG

SEQ ID NO: 1969 - protein, 15 aa, Homo sapiens
RAQDLFLDGVPLRKT

SEQ ID NO: 1970 - protein, 9 aa, Homo sapiens
RFLNYQLRD

SEQ ID NO: 1971 - protein, 13 aa, Homo sapiens
RLLNFDTELSTKE

SEQ ID NO: 1972 - protein, 37 aa, Homo sapiens; identical to SEQ ID NO: 408

SEQ ID NO: 1973 - protein, 14 aa, Homo sapiens
KHKNQFLDIWQLRE

SEQ ID NO: 1974 - protein, 18 aa, Homo sapiens
RATHYHLSSQVQEMAGKI

SEQ ID NO: 1975 - protein, 12 aa, Homo sapiens
KFLPEILALQRD

SEQ ID NO: 1976 - protein, 22 aa, Homo sapiens
KHMVTMDGVREEDLAPFSLRKR

SEQ ID NO: 1977 - protein, 11 aa, Homo sapiens
KILSPPDISRF

SEQ ID NO: 1978 - protein, 18 aa, Homo sapiens
RVSMEETADRLGSIPLRQ

SEQ ID NO: 1979 - protein, 11 aa, Homo sapiens
KILSPPDISRF

SEQ ID NO: 1980 - protein, 14 aa, Homo sapiens
RLHKEPFGEISSRY

SEQ ID NO: 1981 - protein, 14 aa, Homo sapiens
RHAIFTEITTFSRL

SEQ ID NO: 1982 - protein, 19 aa, Homo sapiens
RYLVYGDEYKALRDAVAKA

SEQ ID NO: 1983 - protein, 17 aa, Homo sapiens
KVMNHITDGPRKDLVKG

SEQ ID NO: 1984 - protein, 15 aa, Homo sapiens
KVFIRGGEEFGESKW

SEQ ID NO: 1985 - protein, 14 aa, Homo sapiens
RSSLTLATAINQRG

SEQ ID NO: 1986 - protein, 12 aa, Homo sapiens
RFFPKPYDDSRL

SEQ ID NO: 1987 - protein, 16 aa, Homo sapiens
KTLPTMNNLISQDKRI

SEQ ID NO: 1988 - protein, 15 aa, Homo sapiens
KLIIGDKEIFGISRG

SEQ ID NO: 1989 - protein, 11 aa, Homo sapiens
KILSPPDISRF

SEQ ID NO: 1990 - protein, 15 aa, Homo sapiens
KVHGGTTADMIYSRV

SEQ ID NO: 1991 - protein, 16 aa, Homo sapiens
RTRVPQFSFLDIFPKV

SEQ ID NO: 1992 - protein, 11 aa, Homo sapiens
KEPFGEISSRY

SEQ ID NO: 1993 - protein, 16 aa, Homo sapiens
KTLPTMNNLISQDKRI

SEQ ID NO: 1994 - protein, 17 aa, Homo sapiens
KQPPSDAALTMLSFIKS

SEQ ID NO: 1995 - protein, 20 aa, Homo sapiens
KTSAYSRNDELNHLEEEGRF

SEQ ID NO: 1996 - protein, 16 aa, Homo sapiens
KMQLNVKNVPLKTIRL

SEQ ID NO: 1997 - protein, 15 aa, Homo sapiens
KVHGGTTADMIYSRV

SEQ ID NO: 1998 - protein, 38 aa, Homo sapiens; identical to SEQ ID NO: 169

SEQ ID NO: 1999 - protein, 11 aa, Homo sapiens
KLLQDISEARC

SEQ ID NO: 2000 - protein, 13 aa, Homo sapiens
KHYLDINTVLEKW

SEQ ID NO: 2001 - protein, 26 aa, Homo sapiens
RHKDAWRQPEDTWAALEGLSFSPFRE

SEQ ID NO: 2002 - protein, 24 aa, Homo sapiens
KDAWRQPEDTWAALEGLSFSPFRE

SEQ ID NO: 2003 - protein, 12 aa, Homo sapiens
RSTLMVSDVTRL

SEQ ID NO: 2004 - protein, 18 aa, Homo sapiens
RATHYHLSSQVQEMAGKI

SEQ ID NO: 2005 - protein, 13 aa, Homo sapiens
RLHNEIVYAVEKL

SEQ ID NO: 2006 - protein, 15 aa, Homo sapiens
RLVESISLDENGTRV

SEQ ID NO: 2007 - protein, 20 aa, Homo sapiens
RFFPKPYDDSRLLLDEITRA

SEQ ID NO: 2008 - protein, 17 aa, Homo sapiens
RKRITVEYLQHIVEQKN

SEQ ID NO: 2009 - protein, 15 aa, Homo sapiens
RTQTGHVLGNPQRRD

SEQ ID NO: 2010 - protein, 11 aa, Homo sapiens
KILSPPDISRF

SEQ ID NO: 2011 - protein, 18 aa, Homo sapiens
RKQPPSDAALTMLSFIKS

SEQ ID NO: 2012 - protein, 18 aa, Homo sapiens
RILTIYPQVLHSLMEARW

SEQ ID NO: 2013 - protein, 11 aa, Homo sapiens
KLLQDISEARC

SEQ ID NO: 2014 - protein, 29 aa, Homo sapiens
RGIDKQGALLLEQDGVIKPWMGGEISLRS

SEQ ID NO: 2015 - protein, 29 aa, Homo sapiens
RGIDKQGALLLEQDGVIKPWMGGEISLRS

SEQ ID NO: 2016 - protein, 44 aa, Homo sapiens; identical to SEQ ID NO: 34

SEQ ID NO: 2017 - protein, 18 aa, Homo sapiens
KTPQSQQSAYFLLTLFRE

SEQ ID NO: 2018 - protein, 19 aa, Homo sapiens
RYLVYGDEYKALRDAVAKA

SEQ ID NO: 2019 - protein, 29 aa, Homo sapiens
RGIDKQGALLLEQDGVIKPWMGGEISLRS

SEQ ID NO: 2020 - protein, 29 aa, Homo sapiens
RFQQGKDLQQYVSVVVLDEVGLAEDSPKM

SEQ ID NO: 2021 - protein, 14 aa, Homo sapiens
RVPFNVDFDKLPRH

SEQ ID NO: 2022 - protein, 11 aa, Homo sapiens
RVPFNVDFDKL

SEQ ID NO: 2023 - protein, 34 aa, Homo sapiens; identical to SEQ ID NO: 40

SEQ ID NO: 2024 - protein, 19 aa, Homo sapiens
RVPELQGLVTEHVFLLDKC

SEQ ID NO: 2025 - protein, 9 aa, Homo sapiens
KILAIEMRF

SEQ ID NO: 2026 - protein, 34 aa, Homo sapiens; identical to SEQ ID NO: 40

SEQ ID NO: 2027 - protein, 20 aa, Homo sapiens
KMLGHSADETIGVVHLVLRR

SEQ ID NO: 2028 - protein, 10 aa, Homo sapiens
RLLLDEITRA

SEQ ID NO: 2029 - protein, 18 aa, Homo sapiens
RATHYHLSSQVQEMAGKI

SEQ ID NO: 2030 - protein, 15 aa, Homo sapiens
RGSPNETELIESAKG

SEQ ID NO: 2031 - protein, 35 aa, Homo sapiens; identical to SEQ ID NO: 600

SEQ ID NO: 2032 - protein, 21 aa, Homo sapiens
KHMVTMDGVREEDLAPFSLRK

SEQ ID NO: 2033 - protein, 13 aa, Homo sapiens
KTVNESHGSVERS

SEQ ID NO: 2034 - protein, 16 aa, Homo sapiens
RLQKVMNHITDGPRKD

SEQ ID NO: 2035 - protein, 14 aa, Homo sapiens
RHAIFTEITTFSRL

SEQ ID NO: 2036 - protein, 23 aa, Homo sapiens
RLLLDEITRAQDLFLDGVPLRKT

SEQ ID NO: 2037 - protein, 23 aa, Homo sapiens
RGMEFVQGLSKPGRPHQWVFPKD

SEQ ID NO: 2038 - protein, 19 aa, Homo sapiens
RYLVYGDEYKALRDAVAKA

SEQ ID NO: 2039 - protein, 23 aa, Homo sapiens
KTSAYSRNDELNHLEEEGRFLKA

SEQ ID NO: 2040 - protein, 18 aa, Homo sapiens
RDFATPSLHTSDQSPGKH

SEQ ID NO: 2041 - protein, 9 aa, Homo sapiens
RDYYSLIKM

SEQ ID NO: 2042 - protein, 10 aa, Homo sapiens
RISSNPVAKI

SEQ ID NO: 2043 - protein, 29 aa, Homo sapiens
RFQQGKDLQQYVSVVVLDEVGLAEDSPKM

SEQ ID NO: 2044 - protein, 14 aa, Homo sapiens
RLHKEPFGEISSRY

SEQ ID NO: 2045 - protein, 15 aa, Homo sapiens
RKPSPQDIAQAVLRN

SEQ ID NO: 2046 - protein, 55 aa, Homo sapiens
RDWGVDVFTVPGKGYSLPEPIPLLNAKQILGQLDGGSVAVLPVVDSTNQYLLDRI

SEQ ID NO: 2047 - protein, 16 aa, Homo sapiens
REKQHLLSIDEPLFRS

SEQ ID NO: 2048 - protein, 16 aa, Homo sapiens
KGYSLPEPIPLLNAKQ

SEQ ID NO: 2049 - protein, 19 aa, Homo sapiens
RYLVYGDEYKALRDAVAKA

SEQ ID NO: 2050 - protein, 46 aa, Homo sapiens; identical to SEQ ID NO: 1885

SEQ ID NO: 2051 - protein, 17 aa, Homo sapiens
KKQEESQFHPLEWLARE

SEQ ID NO: 2052 - protein, 56 aa, Homo sapiens; identical to SEQ ID NO: 22

SEQ ID NO: 2053 - protein, 29 aa, Homo sapiens
RGIDKQGALLLEQDGVIKPWMGGEISLRS

SEQ ID NO: 2054 - protein, 15 aa, Homo sapiens
KHLIQVDFGVLAVRH

SEQ ID NO: 2055 - protein, 21 aa, Homo sapiens
RHNSFADFLQAHLHTADLERH

SEQ ID NO: 2056 - protein, 14 aa, Homo sapiens
RDWGVDVFTVPGKG

SEQ ID NO: 2057 - protein, 16 aa, Homo sapiens
RTRVPQFSFLDIFPKV

SEQ ID NO: 2058 - protein, 20 aa, Homo sapiens
KTIVADAMQGPAAYSDLFRS

SEQ ID NO: 2059 - protein, 9 aa, Homo sapiens
KFLSDLRRG

SEQ ID NO: 2060 - protein, 11 aa, Homo sapiens
KILSPPDISRF

SEQ ID NO: 2061 - protein, 14 aa, Homo sapiens
RRLLNFDTELSTKE

SEQ ID NO: 2062 - protein, 15 aa, Homo sapiens
RKPSPQDIAQAVLRN

SEQ ID NO: 2063 - protein, 16 aa, Homo sapiens
KGYSLPEPIPLLNAKQ

SEQ ID NO: 2064 - protein, 17 aa, Homo sapiens
KIIYGDPVTFLPHLPRK

SEQ ID NO: 2065 - protein, 18 aa, Homo sapiens
RVSMEETADRLGSIPLRQ

SEQ ID NO: 2066 - protein, 26 aa, Homo sapiens
KLIALLANGEFHSGEQLGETLGMSRA

SEQ ID NO: 2067 - protein, 14 aa, Homo sapiens
KQTLSAAAVFNDRL

SEQ ID NO: 2068 - protein, 12 aa, Homo sapiens
RDTLVSYMQTKE

SEQ ID NO: 2069 - protein, 13 aa, Homo sapiens
RLLQEQHQLSSRR

SEQ ID NO: 2070 - protein, 23 aa, Homo sapiens
RGMEFVQGLSKPGRPHQWVFPKD

SEQ ID NO: 2071 - protein, 20 aa, Homo sapiens
KMLGHSADETIGVVHLVLRR

SEQ ID NO: 2072 - protein, 18 aa, Homo sapiens
KSLSPFNDVVDKTPVIRS

SEQ ID NO: 2073 - protein, 16 aa, Homo sapiens
KTLPTMNNLISQDKRI

SEQ ID NO: 2074 - protein, 38 aa, Homo sapiens; identical to SEQ ID NO: 169

SEQ ID NO: 2075 - protein, 15 aa, Homo sapiens
RKPSPQDIAQAVLRN

SEQ ID NO: 2076 - protein, 14 aa, Homo sapiens
RSAEKLQLPPLERL

SEQ ID NO: 2077 - protein, 14 aa, Homo sapiens
RVPFNVDFDKLPRH

SEQ ID NO: 2078 - protein, 17 aa, Homo sapiens
KVMNHITDGPRKDLVKG

SEQ ID NO: 2079 - protein, 14 aa, Homo sapiens
RDGFHLVKDKADRT

SEQ ID NO: 2080 - protein, 11 aa, Homo sapiens
KFIKLHQDLKS

SEQ ID NO: 2081 - protein, 12 aa, Homo sapiens
RFFPKPYDDSRL

SEQ ID NO: 2082 - protein, 11 aa, Homo sapiens
KLLQDISEARC

SEQ ID NO: 2083 - protein, 18 aa, Homo sapiens
RENSDVKTHGPFEAVMRT

SEQ ID NO: 2084 - protein, 9 aa, Homo sapiens
KILAIEMRF

SEQ ID NO: 2085 - protein, 10 aa, Homo sapiens
KLQLPPLERL

SEQ ID NO: 2086 - protein, 14 aa, Homo sapiens
RLHKEPFGEISSRY

SEQ ID NO: 2087 - protein, 20 aa, Homo sapiens
KHIQTLRDWGVDVFTVPGKG

SEQ ID NO: 2088 - protein, 13 aa, Homo sapiens
RLLNFDTELSTKE

SEQ ID NO: 2089 - protein, 17 aa, Homo sapiens
KVGFVGISNWALDPAKM

SEQ ID NO: 2090 - protein, 20 aa, Homo sapiens
KTIVADAMQGPAAYSDLFRS

SEQ ID NO: 2091 - protein, 34 aa, Homo sapiens; identical to SEQ ID NO: 40

SEQ ID NO: 2092 - protein, 22 aa, Homo sapiens
RNNWEKEIAAVISPELEHLDKT

SEQ ID NO: 2093 - protein, 16 aa, Homo sapiens
RFATSLVDNSVPLLRA

SEQ ID NO: 2094 - protein, 15 aa, Homo sapiens
RDLSHILGIPQSWRL

SEQ ID NO: 2095 - protein, 15 aa, Homo sapiens
KHTIALWQFLSAHKS

SEQ ID NO: 2096 - protein, 14 aa, Homo sapiens
KQTLSAAAVFNDRL

SEQ ID NO: 2097 - protein, 18 aa, Homo sapiens
RATHYHLSSQVQEMAGKI

SEQ ID NO: 2098 - protein, 20 aa, Homo sapiens
RQDHPGQMDRYLVYGDEYKA

SEQ ID NO: 2099 - protein, 12 aa, Homo sapiens
KLDNFINRPVKL

SEQ ID NO: 2100 - protein, 18 aa, Homo sapiens
KSLSPFNDVVDKTPVIRS

SEQ ID NO: 2101 - protein, 15 aa, Homo sapiens
KHTIALWQFLSAHKS

SEQ ID NO: 2102 - protein, 16 aa, Homo sapiens
RTRVPQFSFLDIFPKV

SEQ ID NO: 2103 - protein, 17 aa, Homo sapiens
KVMNHITDGPRKDLVKG

SEQ ID NO: 2104 - protein, 20 aa, Homo sapiens
RVEQIKEYHHLHQAVHAAKV

SEQ ID NO: 2105 - protein, 34 aa, Homo sapiens; identical to SEQ ID NO: 40

SEQ ID NO: 2106 - protein, 15 aa, Homo sapiens
KKFVDIFQQTPLGRF

SEQ ID NO: 2107 - protein, 20 aa, Homo sapiens
KTSAYSRNDELNHLEEEGRF

SEQ ID NO: 2108 - protein, 17 aa, Homo sapiens
KQPPSDAALTMLSFIKS

SEQ ID NO: 2109 - protein, 29 aa, Homo sapiens
RGIDKQGALLLEQDGVIKPWMGGEISLRS

SEQ ID NO: 2110 - protein, 12 aa, Homo sapiens
KTHGPFEAVMRT

SEQ ID NO: 2111 - protein, 14 aa, Homo sapiens
RSSLTLATAINQRG

SEQ ID NO: 2112 - protein, 14 aa, Homo sapiens
RSSLTLATAINQRG

SEQ ID NO: 2113 - protein, 20 aa, Homo sapiens
RFFPKPYDDSRLLLDEITRA

SEQ ID NO: 2114 - protein, 10 aa, Homo sapiens
RLNDTVTVRL

SEQ ID NO: 2115 - protein, 16 aa, Homo sapiens
RETLDQINQELIQAKK

SEQ ID NO: 2116 - protein, 14 aa, Homo sapiens
RRLLNFDTELSTKE

SEQ ID NO: 2117 - protein, 29 aa, Homo sapiens
RGIDKQGALLLEQDGVIKPWMGGEISLRS

SEQ ID NO: 2118 - protein, 24 aa, Homo sapiens
KDAWRQPEDTWAALEGLSFSPFRE

SEQ ID NO: 2119 - protein, 10 aa, Homo sapiens
KLQLPPLERL

SEQ ID NO: 2120 - protein, 17 aa, Homo sapiens
KQPPSDAALTMLSFIKS

SEQ ID NO: 2121 - protein, 11 aa, Homo sapiens
RGIYVIQAPKG

SEQ ID NO: 2122 - protein, 25 aa, Homo sapiens
KQQGLRQDHPGQMDRYLVYGDEYKA

SEQ ID NO: 2123 - protein, 18 aa, Homo sapiens
RQDKEFFGLRDYYSLIKM

SEQ ID NO: 2124 - protein, 23 aa, Homo sapiens
RLLLDEITRAQDLFLDGVPLRKT

SEQ ID NO: 2125 - protein, 15 aa, Homo sapiens
RHDWNYEHLFMDIKN

SEQ ID NO: 2126 - protein, 10 aa, Homo sapiens
RFRPQWSLRD

SEQ ID NO: 2127 - protein, 18 aa, Homo sapiens
RKQPPSDAALTMLSFIKS

SEQ ID NO: 2128 - protein, 10 aa, Homo sapiens
RYLWQHLKKH

SEQ ID NO: 2129 - protein, 9 aa, Homo sapiens
KILAIEMRF

SEQ ID NO: 2130 - protein, 15 aa, Homo sapiens
RAQDLFLDGVPLRKT

SEQ ID NO: 2131 - protein, 19 aa, Homo sapiens
KASNRKPSPQDIAQAVLRN

SEQ ID NO: 2132 - protein, 21 aa, Homo sapiens
RGLSQEGTGPPTSAGEGHSRT

SEQ ID NO: 2133 - protein, 14 aa, Homo sapiens
RHAIFTEITTFSRL

SEQ ID NO: 2134 - protein, 15 aa, Homo sapiens
KLIIGDKEIFGISRG

SEQ ID NO: 2135 - protein, 12 aa, Homo sapiens
KNQFLDIWQLRE

SEQ ID NO: 2136 - protein, 10 aa, Homo sapiens
KLQLPPLERL

SEQ ID NO: 2137 - protein, 17 aa, Homo sapiens
RNDELNHLEEEGRFLKA

SEQ ID NO: 2138 - protein, 24 aa, Homo sapiens
RNFSGKDDIQALDIFLANLPEAKC

SEQ ID NO: 2139 - protein, 17 aa, Homo sapiens
RNDELNHLEEEGRFLKA

SEQ ID NO: 2140 - protein, 13 aa, Homo sapiens
RAAINKHIQTLRD

SEQ ID NO: 2141 - protein, 9 aa, Homo sapiens
RFLNYQLRD

SEQ ID NO: 2142 - protein, 16 aa, Homo sapiens
RFATSLVDNSVPLLRA

SEQ ID NO: 2143 - protein, 15 aa, Homo sapiens
KVHGGTTADMIYSRV

SEQ ID NO: 2144 - protein, 12 aa, Homo sapiens
KFLPEILALQRD

SEQ ID NO: 2145 - protein, 12 aa, Homo sapiens
RVPILWHFLQKE

SEQ ID NO: 2146 - protein, 9 aa, Homo sapiens
RFLNYQLRD

SEQ ID NO: 2147 - protein, 16 aa, Homo sapiens
RTEDAAQELLLPESKG

SEQ ID NO: 2148 - protein, 12 aa, Homo sapiens
RDLYQGLLLQRV

SEQ ID NO: 2149 - protein, 20 aa, Homo sapiens
RQDHPGQMDRYLVYGDEYKA

SEQ ID NO: 2150 - protein, 31 aa, Homo sapiens; identical to SEQ ID NO: 27

SEQ ID NO: 2151 - protein, 24 aa, Homo sapiens
RNFSGKDDIQALDIFLANLPEAKC

SEQ ID NO: 2152 - protein, 18 aa, Homo sapiens
RENSDVKTHGPFEAVMRT

SEQ ID NO: 2153 - protein, 11 aa, Homo sapiens
KHVVPLPDGKS

SEQ ID NO: 2154 - protein, 10 aa, Homo sapiens
RLLLDEITRA

SEQ ID NO: 2155 - protein, 18 aa, Homo sapiens
RATHYHLSSQVQEMAGKI

SEQ ID NO: 2156 - protein, 45 aa, Homo sapiens; identical to SEQ ID NO: 178

SEQ ID NO: 2157 - protein, 25 aa, Homo sapiens
KLDNFINRPVKLIIGDKEIFGISRG

SEQ ID NO: 2158 - protein, 12 aa, Homo sapiens
RLIDPQVDESRV

SEQ ID NO: 2159 - protein, 18 aa, Homo sapiens
RATHYHLSSQVQEMAGKI

SEQ ID NO: 2160 - protein, 13 aa, Homo sapiens
KILANVTEDAKRL

SEQ ID NO: 2161 - protein, 22 aa, Homo sapiens
KDRVEQIKEYHHLHQAVHAAKV

SEQ ID NO: 2162 - protein, 38 aa, Homo sapiens; identical to SEQ ID NO: 169

SEQ ID NO: 2163 - protein, 18 aa, Homo sapiens
RKQPPSDAALTMLSFIKS

SEQ ID NO: 2164 - protein, 35 aa, Homo sapiens; identical to SEQ ID NO: 600

SEQ ID NO: 2165 - protein, 18 aa, Homo sapiens
RATHYHLSSQVQEMAGKI

SEQ ID NO: 2166 - protein, 17 aa, Homo sapiens
RALTEELHQKVSEEAKS

SEQ ID NO: 2167 - protein, 20 aa, Homo sapiens
KTIVADAMQGPAAYSDLFRS

SEQ ID NO: 2168 - protein, 14 aa, Homo sapiens
RVPQFSFLDIFPKV

SEQ ID NO: 2169 - protein, 25 aa, Homo sapiens
RAPKPTLLWLQQFDTEYSFLKEVRN

SEQ ID NO: 2170 - protein, 15 aa, Homo sapiens
KILIFQTDFEDGIRS

SEQ ID NO: 2171 - protein, 23 aa, Homo sapiens
RGMEFVQGLSKPGRPHQWVFPKD

SEQ ID NO: 2172 - protein, 13 aa, Homo sapiens
RLLQEQHQLSSRR

SEQ ID NO: 2173 - protein, 9 aa, Homo sapiens
REVAILYRS

SEQ ID NO: 2174 - protein, 24 aa, Homo sapiens
KDLQQYVSVVVLDEVGLAEDSPKM

SEQ ID NO: 2175 - protein, 37 aa, Homo sapiens; identical to SEQ ID NO: 408

SEQ ID NO: 2176 - protein, 20 aa, Homo sapiens
RVEQIKEYHHLHQAVHAAKV

SEQ ID NO: 2177 - protein, 19 aa, Homo sapiens
RYLVYGDEYKALRDAVAKA

SEQ ID NO: 2178 - protein, 14 aa, Homo sapiens
RMKQPPATTPPFKT

SEQ ID NO: 2179 - protein, 29 aa, Homo sapiens
KQILGQLDGGSVAVLPVVDSTNQYLLDRI

SEQ ID NO: 2180 - protein, 25 aa, Homo sapiens
KLDNFINRPVKLIIGDKEIFGISRG

SEQ ID NO: 2181 - protein, 26 aa, Homo sapiens
KLIALLANGEFHSGEQLGETLGMSRA

SEQ ID NO: 2182 - protein, 14 aa, Homo sapiens
KHKNQFLDIWQLRE

SEQ ID NO: 2183 - protein, 17 aa, Homo sapiens
RKRITVEYLQHIVEQKN

SEQ ID NO: 2184 - protein, 14 aa, Homo sapiens
RHAIFTEITTFSRL

SEQ ID NO: 2185 - protein, 23 aa, Homo sapiens
KDNAPPEKEVIESLLSLLFVQKG

SEQ ID NO: 2186 - protein, 25 aa, Homo sapiens
KQGALLLEQDGVIKPWMGGEISLRS

SEQ ID NO: 2187 - protein, 14 aa, Homo sapiens
RRLLQEQHQLSSRR

SEQ ID NO: 2188 - protein, 11 aa, Homo sapiens
RNTLAATLIRE

SEQ ID NO: 2189 - protein, 16 aa, Homo sapiens
RFATSLVDNSVPLLRA

SEQ ID NO: 2190 - protein, 14 aa, Homo sapiens
KQHLLSIDEPLFRS

SEQ ID NO: 2191 - protein, 12 aa, Homo sapiens
KALDKDQYLPRK

SEQ ID NO: 2192 - protein, 17 aa, Homo sapiens
RHDWNYEHLFMDIKNKM

SEQ ID NO: 2193 - protein, 14 aa, Homo sapiens
RLHKEPFGEISSRY

SEQ ID NO: 2194 - protein, 16 aa, Homo sapiens
RFATSLVDNSVPLLRA

SEQ ID NO: 2195 - protein, 16 aa, Homo sapiens
RTRVPQFSFLDIFPKV

SEQ ID NO: 2196 - protein, 29 aa, Homo sapiens
RFQQGKDLQQYVSVVVLDEVGLAEDSPKM

SEQ ID NO: 2197 - protein, 20 aa, Homo sapiens
KTSAYSRNDELNHLEEEGRF

SEQ ID NO: 2198 - protein, 18 aa, Homo sapiens
RILTIYPQVLHSLMEARW

SEQ ID NO: 2199 - protein, 13 aa, Homo sapiens
RLHNEIVYAVEKL

SEQ ID NO: 2200 - protein, 11 aa, Homo sapiens
RGIYVIQAPKG

SEQ ID NO: 2201 - protein, 17 aa, Homo sapiens
KQPPSDAALTMLSFIKS

SEQ ID NO: 2202 - protein, 16 aa, Homo sapiens
RTRVPQFSFLDIFPKV

SEQ ID NO: 2203 - protein, 12 aa, Homo sapiens
KNQEADVQEVKA

SEQ ID NO: 2204 - protein, 27 aa, Homo sapiens
RLSTSSNSQRATHYHLSSQVQEMAGKI

SEQ ID NO: 2205 - protein, 18 aa, Homo sapiens
KIIYGDPVTFLPHLPRKS

SEQ ID NO: 2206 - protein, 11 aa, Homo sapiens
RYLVYGDEYKA

SEQ ID NO: 2207 - protein, 15 aa, Homo sapiens
KVHGGTTADMIYSRV

SEQ ID NO: 2208 - protein, 13 aa, Homo sapiens
RLLNFDTELSTKE

SEQ ID NO: 2209 - protein, 14 aa, Homo sapiens
RDWGVDVFTVPGKG

SEQ ID NO: 2210 - protein, 13 aa, Homo sapiens
RLIAVADSVLTKV

SEQ ID NO: 2211 - protein, 22 aa, Homo sapiens
RAPKPTLLWLQQFDTEYSFLKE

SEQ ID NO: 2212 - protein, 10 aa, Homo sapiens
RIIMEQSMRC

SEQ ID NO: 2213 - protein, 23 aa, Homo sapiens
RLSVFLKKQEESQFHPLEWLARE

SEQ ID NO: 2214 - protein, 12 aa, Homo sapiens
REEDLAPFSLRK

SEQ ID NO: 2215 - protein, 56 aa, Homo sapiens; identical to SEQ ID NO: 22

SEQ ID NO: 2216 - protein, 12 aa, Homo sapiens
RVQGYFASFAKA

SEQ ID NO: 2217 - protein, 17 aa, Homo sapiens
KIIYGDPVTFLPHLPRK

SEQ ID NO: 2218 - protein, 13 aa, Homo sapiens
KALDKDQYLPRKL

SEQ ID NO: 2219 - protein, 17 aa, Homo sapiens
KVMNHITDGPRKDLVKG

SEQ ID NO: 2220 - protein, 19 aa, Homo sapiens
RHSQDLSSKRLNDTVTVRL

SEQ ID NO: 2221 - protein, 9 aa, Homo sapiens
REELLLLKK

SEQ ID NO: 2222 - protein, 29 aa, Homo sapiens
RFQQGKDLQQYVSVVVLDEVGLAEDSPKM

SEQ ID NO: 2223 - protein, 26 aa, Homo sapiens
KLIALLANGEFHSGEQLGETLGMSRA

SEQ ID NO: 2224 - protein, 12 aa, Homo sapiens
KLDNFINRPVKL

SEQ ID NO: 2225 - protein, 25 aa, Homo sapiens
KLDNFINRPVKLIIGDKEIFGISRG

SEQ ID NO: 2226 - protein, 11 aa, Homo sapiens
KHMVTMDGVRE

SEQ ID NO: 2227 - protein, 20 aa, Homo sapiens
RGREPANEASVEYLQEVARI

SEQ ID NO: 2228 - protein, 27 aa, Homo sapiens
RLIDPQVDESRVLGALLPFLDAQYQKV

SEQ ID NO: 2229 - protein, 12 aa, Homo sapiens
KFLPEILALQRD

SEQ ID NO: 2230 - protein, 18 aa, Homo sapiens
RENSDVKTHGPFEAVMRT

SEQ ID NO: 2231 - protein, 21 aa, Homo sapiens
RGLSQEGTGPPTSAGEGHSRT

SEQ ID NO: 2232 - protein, 56 aa, Homo sapiens; identical to SEQ ID NO: 22

SEQ ID NO: 2233 - protein, 36 aa, Homo sapiens; identical to SEQ ID NO: 745

SEQ ID NO: 2234 - protein, 20 aa, Homo sapiens
RVQGAVTPLLASMISFIDRD

SEQ ID NO: 2235 - protein, 14 aa, Homo sapiens
RVPFNVDFDKLPRH

SEQ ID NO: 2236 - protein, 10 aa, Homo sapiens
RLLLDEITRA

SEQ ID NO: 2237 - protein, 20 aa, Homo sapiens
KTIVADAMQGPAAYSDLFRS

SEQ ID NO: 2238 - protein, 25 aa, Homo sapiens
KILSPPDISRFATSLVDNSVPLLRA

SEQ ID NO: 2239 - protein, 13 aa, Homo sapiens
RLIAVADSVLTKV

SEQ ID NO: 2240 - protein, 46 aa, Homo sapiens; identical to SEQ ID NO: 1885

SEQ ID NO: 2241 - protein, 12 aa, Homo sapiens
RVPILWHFLQKE

SEQ ID NO: 2242 - protein, 14 aa, Homo sapiens
RRLLQEQHQLSSRR

SEQ ID NO: 2243 - protein, 17 aa, Homo sapiens
RALTEELHQKVSEEAKS

SEQ ID NO: 2244 - protein, 20 aa, Homo sapiens
RFFPKPYDDSRLLLDEITRA

SEQ ID NO: 2245 - protein, 14 aa, Homo sapiens
RSAEKLQLPPLERL

SEQ ID NO: 2246 - protein, 15 aa, Homo sapiens
RKPSPQDIAQAVLRN

SEQ ID NO: 2247 - protein, 20 aa, Homo sapiens
RDLVKQFQNVQQVEYSSIRG

SEQ ID NO: 2248 - protein, 29 aa, Homo sapiens
KQILGQLDGGSVAVLPVVDSTNQYLLDRI

SEQ ID NO: 2249 - protein, 13 aa, Homo sapiens
RLLNFDTELSTKE

SEQ ID NO: 2250 - protein, 19 aa, Homo sapiens
RYLVYGDEYKALRDAVAKA

SEQ ID NO: 2251 - protein, 29 aa, Homo sapiens
KQILGQLDGGSVAVLPVVDSTNQYLLDRI

SEQ ID NO: 2252 - protein, 23 aa, Homo sapiens
RLLLDEITRAQDLFLDGVPLRKT

SEQ ID NO: 2253 - protein, 38 aa, Homo sapiens; identical to SEQ ID NO: 169

SEQ ID NO: 2254 - protein, 14 aa, Homo sapiens
RRLLNFDTELSTKE

SEQ ID NO: 2255 - protein, 16 aa, Homo sapiens
RTRVPQFSFLDIFPKV

SEQ ID NO: 2256 - protein, 10 aa, Homo sapiens
RFRPQWSLRD

SEQ ID NO: 2257 - protein, 17 aa, Homo sapiens
RVPILWHFLQKEAELRL

SEQ ID NO: 2258 - protein, 15 aa, Homo sapiens
KILIFQTDFEDGIRS

SEQ ID NO: 2259 - protein, 14 aa, Homo sapiens
RGGTNADTIKLVKV

SEQ ID NO: 2260 - protein, 9 aa, Homo sapiens
REVAILYRS

SEQ ID NO: 2261 - protein, 29 aa, Homo sapiens
KNLAFSPATMAHAFLPTMPEDLLAQARRW

SEQ ID NO: 2262 - protein, 11 aa, Homo sapiens
RNTLAATLIRE

SEQ ID NO: 2263 - protein, 11 aa, Homo sapiens
RYLVYGDEYKA

SEQ ID NO: 2264 - protein, 23 aa, Homo sapiens
KTSAYSRNDELNHLEEEGRFLKA

SEQ ID NO: 2265 - protein, 21 aa, Homo sapiens
RGLSQEGTGPPTSAGEGHSRT

SEQ ID NO: 2266 - protein, 11 aa, Homo sapiens
KASWTVQESKK

SEQ ID NO: 2267 - protein, 34 aa, Homo sapiens; identical to SEQ ID NO: 40

SEQ ID NO: 2268 - protein, 14 aa, Homo sapiens
RSAEKLQLPPLERL

SEQ ID NO: 2269 - protein, 12 aa, Homo sapiens
KFLPEILALQRD

SEQ ID NO: 2270 - protein, 15 aa, Homo sapiens
KLIIGDKEIFGISRG

SEQ ID NO: 2271 - protein, 29 aa, Homo sapiens
RGIDKQGALLLEQDGVIKPWMGGEISLRS

SEQ ID NO: 2272 - protein, 25 aa, Homo sapiens
KQQGLRQDHPGQMDRYLVYGDEYKA

SEQ ID NO: 2273 - protein, 15 aa, Homo sapiens
RGIYVIQAPKGGQKI

SEQ ID NO: 2274 - protein, 14 aa, Homo sapiens
RSAEKLQLPPLERL

SEQ ID NO: 2275 - protein, 14 aa, Homo sapiens
RMKQPPATTPPFKT

SEQ ID NO: 2276 - protein, 19 aa, Homo sapiens
RYLVYGDEYKALRDAVAKA

SEQ ID NO: 2277 - protein, 14 aa, Homo sapiens
RVPFNVDFDKLPRH

SEQ ID NO: 2278 - protein, 20 aa, Homo sapiens
RGREPANEASVEYLQEVARI

SEQ ID NO: 2279 - protein, 20 aa, Homo sapiens
RDLVKQFQNVQQVEYSSIRG

SEQ ID NO: 2280 - protein, 17 aa, Homo sapiens
RVPILWHFLQKEAELRL

SEQ ID NO: 2281 - protein, 17 aa, Homo sapiens
KQPPSDAALTMLSFIKS

SEQ ID NO: 2282 - protein, 13 aa, Homo sapiens
RLIAVADSVLTKV

SEQ ID NO: 2283 - protein, 26 aa, Homo sapiens
KLIALLANGEFHSGEQLGETLGMSRA

SEQ ID NO: 2284 - protein, 17 aa, Homo sapiens
RALTEELHQKVSEEAKS

SEQ ID NO: 2285 - protein, 14 aa, Homo sapiens
RVREAENVAFANKD

SEQ ID NO: 2286 - protein, 12 aa, Homo sapiens
REALGGINELKV

SEQ ID NO: 2287 - protein, 14 aa, Homo sapiens
RVPQFSFLDIFPKV

SEQ ID NO: 2288 - protein, 14 aa, Homo sapiens
RRLLNFDTELSTKE

SEQ ID NO: 2289 - protein, 15 aa, Homo sapiens
RGIYVIQAPKGGQKI

SEQ ID NO: 2290 - protein, 13 aa, Homo sapiens
KILANVTEDAKRL

SEQ ID NO: 2291 - protein, 13 aa, Homo sapiens
RLLQEQHQLSSRR

SEQ ID NO: 2292 - protein, 14 aa, Homo sapiens
RVKWPNDLYLQDRK

SEQ ID NO: 2293 - protein, 23 aa, Homo sapiens
KRGPAAIGLGPVIGIVMAEALRK

SEQ ID NO: 2294 - protein, 13 aa, Homo sapiens
RLLNFDTELSTKE

SEQ ID NO: 2295 - protein, 19 aa, Homo sapiens
RAALELFEQEGLAPYLPRW

SEQ ID NO: 2296 - protein, 34 aa, Homo sapiens; identical to SEQ ID NO: 40

SEQ ID NO: 2297 - protein, 24 aa, Homo sapiens
RNFSGKDDIQALDIFLANLPEAKC

SEQ ID NO: 2298 - protein, 28 aa, Homo sapiens
KDLQQYVSVVVLDEVGLAEDSPKMPLKT

SEQ ID NO: 2299 - protein, 14 aa, Homo sapiens
RLHKEPFGEISSRY

SEQ ID NO: 2300 - protein, 14 aa, Homo sapiens
RHAIFTEITTFSRL

SEQ ID NO: 2301 - protein, 21 aa, Homo sapiens
RTADNFDDILKHLLTLADVKH

SEQ ID NO: 2302 - protein, 22 aa, Homo sapiens
RAPKPTLLWLQQFDTEYSFLKE

SEQ ID NO: 2303 - protein, 12 aa, Homo sapiens
KWPNDLYLQDRK

SEQ ID NO: 2304 - protein, 35 aa, Homo sapiens; identical to SEQ ID NO: 600

SEQ ID NO: 2305 - protein, 18 aa, Homo sapiens
RKQPPSDAALTMLSFIKS

SEQ ID NO: 2306 - protein, 17 aa, Homo sapiens
RNDELNHLEEEGRFLKA

SEQ ID NO: 2307 - protein, 20 aa, Homo sapiens
RDLVKQFQNVQQVEYSSIRG

SEQ ID NO: 2308 - protein, 38 aa, Homo sapiens; identical to SEQ ID NO: 169

SEQ ID NO: 2309 - protein, 19 aa, Homo sapiens
RYLVYGDEYKALRDAVAKA

SEQ ID NO: 2310 - protein, 17 aa, Homo sapiens
KVGFVGISNWALDPAKM

SEQ ID NO: 2311 - protein, 25 aa, Homo sapiens
KILSPPDISRFATSLVDNSVPLLRA

SEQ ID NO: 2312 - protein, 10 aa, Homo sapiens
RLLLDEITRA

SEQ ID NO: 2313 - protein, 17 aa, Homo sapiens
RNDELNHLEEEGRFLKA

SEQ ID NO: 2314 - protein, 18 aa, Homo sapiens
KIIYGDPVTFLPHLPRKS

SEQ ID NO: 2315 - protein, 12 aa, Homo sapiens
REEDLAPFSLRK

SEQ ID NO: 2316 - protein, 37 aa, Homo sapiens; identical to SEQ ID NO: 408

SEQ ID NO: 2317 - protein, 13 aa, Homo sapiens
KILANVTEDAKRL

SEQ ID NO: 2318 - protein, 25 aa, Homo sapiens
RAPKPTLLWLQQFDTEYSFLKEVRN

SEQ ID NO: 2319 - protein, 15 aa, Homo sapiens
KVHGGTTADMIYSRV

SEQ ID NO: 2320 - protein, 14 aa, Homo sapiens
RVPFNVDFDKLPRH

SEQ ID NO: 2321 - protein, 14 aa, Homo sapiens
RLHKEPFGEISSRY

SEQ ID NO: 2322 - protein, 15 aa, Homo sapiens
RAQDLFLDGVPLRKT

SEQ ID NO: 2323 - protein, 12 aa, Homo sapiens
RETVQEFDLEKI

SEQ ID NO: 2324 - protein, 37 aa, Homo sapiens; identical to SEQ ID NO: 408

SEQ ID NO: 2325 - protein, 14 aa, Homo sapiens
RYLVYGDEYKALRD

SEQ ID NO: 2326 - protein, 13 aa, Homo sapiens
RRSTLMVSDVTRL

SEQ ID NO: 2327 - protein, 12 aa, Homo sapiens
RVPILWHFLQKE

SEQ ID NO: 2328 - protein, 15 aa, Homo sapiens
RAQDLFLDGVPLRKT

SEQ ID NO: 2329 - protein, 14 aa, Homo sapiens
KQTLSAAAVFNDRL

SEQ ID NO: 2330 - protein, 28 aa, Homo sapiens
KNLAFSPATMAHAFLPTMPEDLLAQARR

SEQ ID NO: 2331 - protein, 13 aa, Homo sapiens
RLLNFDTELSTKE

SEQ ID NO: 2332 - protein, 37 aa, Homo sapiens; identical to SEQ ID NO: 408

SEQ ID NO: 2333 - protein, 17 aa, Homo sapiens
RNDELNHLEEEGRFLKA

SEQ ID NO: 2334 - protein, 15 aa, Homo sapiens
RLVESISLDENGTRV

SEQ ID NO: 2335 - protein, 14 aa, Homo sapiens
RSAEKLQLPPLERL

SEQ ID NO: 2336 - protein, 12 aa, Homo sapiens
KALDKDQYLPRK

SEQ ID NO: 2337 - protein, 16 aa, Homo sapiens
KRITVEYLQHIVEQKN

SEQ ID NO: 2338 - protein, 17 aa, Homo sapiens
KQPPSDAALTMLSFIKS

SEQ ID NO: 2339 - protein, 14 aa, Homo sapiens
RNDELNHLEEEGRF

SEQ ID NO: 2340 - protein, 38 aa, Homo sapiens; identical to SEQ ID NO: 169

SEQ ID NO: 2341 - protein, 38 aa, Homo sapiens; identical to SEQ ID NO: 169

SEQ ID NO: 2342 - protein, 16 aa, Homo sapiens
RTRVPQFSFLDIFPKV

SEQ ID NO: 2343 - protein, 19 aa, Homo sapiens
RNLEWLKTVNESHGSVERS

SEQ ID NO: 2344 - protein, 20 aa, Homo sapiens
KTIVADAMQGPAAYSDLFRS

SEQ ID NO: 2345 - protein, 11 aa, Homo sapiens
RYLVYGDEYKA

SEQ ID NO: 2346 - protein, 18 aa, Homo sapiens
RATHYHLSSQVQEMAGKI

SEQ ID NO: 2347 - protein, 20 aa, Homo sapiens
RFFPKPYDDSRLLLDEITRA

SEQ ID NO: 2348 - protein, 15 aa, Homo sapiens
KVHGGTTADMIYSRV

SEQ ID NO: 2349 - protein, 24 aa, Homo sapiens
RNFSGKDDIQALDIFLANLPEAKC

SEQ ID NO: 2350 - protein, 12 aa, Homo sapiens
KILANVTEDAKR

SEQ ID NO: 2351 - protein, 13 aa, Homo sapiens
RRSTLMVSDVTRL

SEQ ID NO: 2352 - protein, 17 aa, Homo sapiens
KQPPSDAALTMLSFIKS

SEQ ID NO: 2353 - protein, 25 aa, Homo sapiens
RLVEIQFPAEHGWKESLLGDMEWRL

SEQ ID NO: 2354 - protein, 29 aa, Homo sapiens
RGIDKQGALLLEQDGVIKPWMGGEISLRS

SEQ ID NO: 2355 - protein, 29 aa, Homo sapiens
RGIDKQGALLLEQDGVIKPWMGGEISLRS

SEQ ID NO: 2356 - protein, 12 aa, Homo sapiens
RLIDPQVDESRV

SEQ ID NO: 2357 - protein, 13 aa, Homo sapiens
REEDLAPFSLRKR

SEQ ID NO: 2358 - protein, 12 aa, Homo sapiens
KTHGPFEAVMRT

SEQ ID NO: 2359 - protein, 13 aa, Homo sapiens
RLLNFDTELSTKE

SEQ ID NO: 2360 - protein, 12 aa, Homo sapiens
RDSHIFQLFWRE

SEQ ID NO: 2361 - protein, 14 aa, Homo sapiens
RRLLNFDTELSTKE

SEQ ID NO: 2362 - protein, 12 aa, Homo sapiens
KTHGPFEAVMRT

SEQ ID NO: 2363 - protein, 9 aa, Homo sapiens
RYLWQHLKK

SEQ ID NO: 2364 - protein, 17 aa, Homo sapiens
RALTEELHQKVSEEAKS

SEQ ID NO: 2365 - protein, 25 aa, Homo sapiens
KLDNFINRPVKLIIGDKEIFGISRG

SEQ ID NO: 2366 - protein, 15 aa, Homo sapiens
RGSPNETELIESAKG

SEQ ID NO: 2367 - protein, 29 aa, Homo sapiens
RGIDKQGALLLEQDGVIKPWMGGEISLRS

SEQ ID NO: 2368 - protein, 20 aa, Homo sapiens
RQPEDTWAALEGLSFSPFRE

SEQ ID NO: 2369 - protein, 14 aa, Homo sapiens
KNQFLDIWQLREKS

SEQ ID NO: 2370 - protein, 26 aa, Homo sapiens
KVFVTPQAPLEAIQAYLAGHYRVPKQ

SEQ ID NO: 2371 - protein, 19 aa, Homo sapiens
RAALELFEQEGLAPYLPRW

SEQ ID NO: 2372 - protein, 17 aa, Homo sapiens
KQPPSDAALTMLSFIKS

SEQ ID NO: 2373 - protein, 14 aa, Homo sapiens
RVKWPNDLYLQDRK

SEQ ID NO: 2374 - protein, 19 aa, Homo sapiens
KDDIQALDIFLANLPEAKC

SEQ ID NO: 2375 - protein, 17 aa, Homo sapiens
RNTLKPSPQAWLQLVKN

SEQ ID NO: 2376 - protein, 13 aa, Homo sapiens
RAAINKHIQTLRD

SEQ ID NO: 2377 - protein, 15 aa, Homo sapiens
RLVESISLDENGTRV

SEQ ID NO: 2378 - protein, 25 aa, Homo sapiens
KEMRNNWEKEIAAVISPELEHLDKT

SEQ ID NO: 2379 - protein, 20 aa, Homo sapiens
RVEQIKEYHHLHQAVHAAKV

SEQ ID NO: 2380 - protein, 29 aa, Homo sapiens
KQILGQLDGGSVAVLPVVDSTNQYLLDRI

SEQ ID NO: 2381 - protein, 15 aa, Homo sapiens
RWEKLDNFINRPVKL

SEQ ID NO: 2382 - protein, 14 aa, Homo sapiens
RNDELNHLEEEGRF

SEQ ID NO: 2383 - protein, 11 aa, Homo sapiens
KYSVINEINKI

SEQ ID NO: 2384 - protein, 38 aa, Homo sapiens; identical to SEQ ID NO: 169

SEQ ID NO: 2385 - protein, 17 aa, Homo sapiens
RALTEELHQKVSEEAKS

SEQ ID NO: 2386 - protein, 14 aa, Homo sapiens
RSAEKLQLPPLERL

SEQ ID NO: 2387 - protein, 15 aa, Homo sapiens
KVHGGTTADMIYSRV

SEQ ID NO: 2388 - protein, 12 aa, Homo sapiens
RDTLVSYMQTKE

SEQ ID NO: 2389 - protein, 22 aa, Homo sapiens
RAPKPTLLWLQQFDTEYSFLKE

SEQ ID NO: 2390 - protein, 14 aa, Homo sapiens
RSAEKLQLPPLERL

SEQ ID NO: 2391 - protein, 14 aa, Homo sapiens
RSSLTLATAINQRG

SEQ ID NO: 2392 - protein, 17 aa, Homo sapiens
KIIYGDPVTFLPHLPRK

SEQ ID NO: 2393 - protein, 29 aa, Homo sapiens
RFQQGKDLQQYVSVVVLDEVGLAEDSPKM

SEQ ID NO: 2394 - protein, 12 aa, Homo sapiens
KNQFLDIWQLRE

SEQ ID NO: 2395 - protein, 17 aa, Homo sapiens
RNTLKPSPQAWLQLVKN

SEQ ID NO: 2396 - protein, 23 aa, Homo sapiens
RQRHNSFADFLQAHLHTADLERH

SEQ ID NO: 2397 - protein, 15 aa, Homo sapiens
KILIFQTDFEDGIRS

SEQ ID NO: 2398 - protein, 15 aa, Homo sapiens
RHDWNYEHLFMDIKN

SEQ ID NO: 2399 - protein, 13 aa, Homo sapiens
RLLNFDTELSTKE

SEQ ID NO: 2400 - protein, 20 aa, Homo sapiens
RGREPANEASVEYLQEVARI

SEQ ID NO: 2401 - protein, 12 aa, Homo sapiens
RITVFLSTWNKL

SEQ ID NO: 2402 - protein, 18 aa, Homo sapiens
RAADFLSEPEGGPEMAKE

SEQ ID NO: 2403 - protein, 22 aa, Homo sapiens
KHMVTMDGVREEDLAPFSLRKR

SEQ ID NO: 2404 - protein, 13 aa, Homo sapiens
KALDKDQYLPRKL

SEQ ID NO: 2405 - protein, 12 aa, Homo sapiens
RSTLMVSDVTRL

SEQ ID NO: 2406 - protein, 12 aa, Homo sapiens
RFFPKPYDDSRL

SEQ ID NO: 2407 - protein, 22 aa, Homo sapiens
RVMEELPLMLLSEFSLVDKLRI

SEQ ID NO: 2408 - protein, 29 aa, Homo sapiens
RFQQGKDLQQYVSVVVLDEVGLAEDSPKM

SEQ ID NO: 2409 - protein, 12 aa, Homo sapiens
RFLKAYSPASRG

SEQ ID NO: 2410 - protein, 14 aa, Homo sapiens
RLHKEPFGEISSRY

SEQ ID NO: 2411 - protein, 20 aa, Homo sapiens
RDLVKQFQNVQQVEYSSIRG

SEQ ID NO: 2412 - protein, 18 aa, Homo sapiens
KIIYGDPVTFLPHLPRKS

SEQ ID NO: 2413 - protein, 14 aa, Homo sapiens
RVKWPNDLYLQDRK

SEQ ID NO: 2414 - protein, 12 aa, Homo sapiens
KRQDKEFFGLRD

SEQ ID NO: 2415 - protein, 14 aa, Homo sapiens
RVKWPNDLYLQDRK

SEQ ID NO: 2416 - protein, 23 aa, Homo sapiens
RQRHNSFADFLQAHLHTADLERH

SEQ ID NO: 2417 - protein, 17 aa, Homo sapiens
KVMNHITDGPRKDLVKG

SEQ ID NO: 2418 - protein, 13 aa, Homo sapiens
RAAINKHIQTLRD

SEQ ID NO: 2419 - protein, 12 aa, Homo sapiens
RDTLVSYMQTKE

SEQ ID NO: 2420 - protein, 14 aa, Homo sapiens
RSAEKLQLPPLERL

SEQ ID NO: 2421 - protein, 14 aa, Homo sapiens
RMKQPPATTPPFKT

SEQ ID NO: 2422 - protein, 25 aa, Homo sapiens
KIKDYLEELWVQAQYITDAEGLPKK

SEQ ID NO: 2423 - protein, 29 aa, Homo sapiens
RGIDKQGALLLEQDGVIKPWMGGEISLRS

SEQ ID NO: 2424 - protein, 25 aa, Homo sapiens
KLDNFINRPVKLIIGDKEIFGISRG

SEQ ID NO: 2425 - protein, 38 aa, Homo sapiens; identical to SEQ ID NO: 169

SEQ ID NO: 2426 - protein, 15 aa, Homo sapiens
RAQDLFLDGVPLRKT

SEQ ID NO: 2427 - protein, 29 aa, Homo sapiens
RGIDKQGALLLEQDGVIKPWMGGEISLRS

SEQ ID NO: 2428 - protein, 18 aa, Homo sapiens
KGFLQQHILKDLEQLAKM

SEQ ID NO: 2429 - protein, 29 aa, Homo sapiens
RGIDKQGALLLEQDGVIKPWMGGEISLRS

SEQ ID NO: 2430 - protein, 23 aa, Homo sapiens
RGMEFVQGLSKPGRPHQWVFPKD

SEQ ID NO: 2431 - protein, 16 aa, Homo sapiens
RETLDQINQELIQAKK

SEQ ID NO: 2432 - protein, 14 aa, Homo sapiens
RGGTNADTIKLVKV

SEQ ID NO: 2433 - protein, 10 aa, Homo sapiens
RIIMEQSMRC

SEQ ID NO: 2434 - protein, 13 aa, Homo sapiens
RLLNFDTELSTKE

SEQ ID NO: 2435 - protein, 31 aa, Homo sapiens; identical to SEQ ID NO: 176

SEQ ID NO: 2436 - protein, 18 aa, Homo sapiens
KGFLQQHILKDLEQLAKM

SEQ ID NO: 2437 - protein, 14 aa, Homo sapiens
RVREAENVAFANKD

SEQ ID NO: 2438 - protein, 20 aa, Homo sapiens
RQPEDTWAALEGLSFSPFRE

SEQ ID NO: 2439 - protein, 16 aa, Homo sapiens
KGYSLPEPIPLLNAKQ

SEQ ID NO: 2440 - protein, 15 aa, Homo sapiens
REYSLEEVKELLNKL

SEQ ID NO: 2441 - protein, 14 aa, Homo sapiens
RVPFNVDFDKLPRH

SEQ ID NO: 2442 - protein, 19 aa, Homo sapiens
KASNRKPSPQDIAQAVLRN

SEQ ID NO: 2443 - protein, 20 aa, Homo sapiens
RVMEELPLMLLSEFSLVDKL

SEQ ID NO: 2444 - protein, 34 aa, Homo sapiens; identical to SEQ ID NO: 67

SEQ ID NO: 2445 - protein, 14 aa, Homo sapiens
RRLLNFDTELSTKE

SEQ ID NO: 2446 - protein, 14 aa, Homo sapiens
RNDELNHLEEEGRF

SEQ ID NO: 2447 - protein, 16 aa, Homo sapiens
KQFQNVQQVEYSSIRG

SEQ ID NO: 2448 - protein, 28 aa, Homo sapiens
KDLQQYVSVVVLDEVGLAEDSPKMPLKT

SEQ ID NO: 2449 - protein, 14 aa, Homo sapiens
RRLLNFDTELSTKE

SEQ ID NO: 2450 - protein, 56 aa, Homo sapiens; identical to SEQ ID NO: 22

SEQ ID NO: 2451 - protein, 12 aa, Homo sapiens
KILANVTEDAKR

SEQ ID NO: 2452 - protein, 20 aa, Homo sapiens
RDLVKQFQNVQQVEYSSIRG

SEQ ID NO: 2453 - protein, 14 aa, Homo sapiens
KQTLSAAAVFNDRL

SEQ ID NO: 2454 - protein, 14 aa, Homo sapiens
RHAIFTEITTFSRL

SEQ ID NO: 2455 - protein, 16 aa, Homo sapiens
RLHNEIVYAVEKLSKE

SEQ ID NO: 2456 - protein, 59 aa, Homo sapiens; identical to SEQ ID NO: 88

SEQ ID NO: 2457 - protein, 29 aa, Homo sapiens
RGIDKQGALLLEQDGVIKPWMGGEISLRS

SEQ ID NO: 2458 - protein, 25 aa, Homo sapiens
RLQHVTISQLFAPGDLPELGLEHRA

SEQ ID NO: 2459 - protein, 12 aa, Homo sapiens
KTHGPFEAVMRT

SEQ ID NO: 2460 - protein, 17 aa, Homo sapiens
RNDELNHLEEEGRFLKA

SEQ ID NO: 2461 - protein, 19 aa, Homo sapiens
KASNRKPSPQDIAQAVLRN

SEQ ID NO: 2462 - protein, 14 aa, Homo sapiens
KRLIAVADSVLTKV

SEQ ID NO: 2463 - protein, 17 aa, Homo sapiens
KQPPSDAALTMLSFIKS

SEQ ID NO: 2464 - protein, 25 aa, Homo sapiens
KQGALLLEQDGVIKPWMGGEISLRS

SEQ ID NO: 2465 - protein, 21 aa, Homo sapiens
KHMVTMDGVREEDLAPFSLRK

SEQ ID NO: 2466 - protein, 15 aa, Homo sapiens
RAQDLFLDGVPLRKT

SEQ ID NO: 2467 - protein, 25 aa, Homo sapiens
KLDNFINRPVKLIIGDKEIFGISRG

SEQ ID NO: 2468 - protein, 21 aa, Homo sapiens
RGLSQEGTGPPTSAGEGHSRT

SEQ ID NO: 2469 - protein, 16 aa, Homo sapiens
RLLNFDTELSTKEMRN

SEQ ID NO: 2470 - protein, 20 aa, Homo sapiens
RGREPANEASVEYLQEVARI

SEQ ID NO: 2471 - protein, 12 aa, Homo sapiens
REEDLAPFSLRK

SEQ ID NO: 2472 - protein, 28 aa, Homo sapiens
KDLQQYVSVVVLDEVGLAEDSPKMPLKT

SEQ ID NO: 2473 - protein, 35 aa, Homo sapiens; identical to SEQ ID NO: 600

SEQ ID NO: 2474 - protein, 19 aa, Homo sapiens
RLSQAFIDLHSAGNMLFRT

SEQ ID NO: 2475 - protein, 37 aa, Homo sapiens; identical to SEQ ID NO: 408

SEQ ID NO: 2476 - protein, 13 aa, Homo sapiens
KEVIDMELSALRS

SEQ ID NO: 2477 - protein, 34 aa, Homo sapiens; identical to SEQ ID NO: 67

SEQ ID NO: 2478 - protein, 15 aa, Homo sapiens
RVKWPNDLYLQDRKL

SEQ ID NO: 2479 - protein, 48 aa, Homo sapiens; identical to SEQ ID NO: 18

SEQ ID NO: 2480 - protein, 56 aa, Homo sapiens; identical to SEQ ID NO: 22

SEQ ID NO: 2481 - protein, 16 aa, Homo sapiens
KGYSLPEPIPLLNAKQ

SEQ ID NO: 2482 - protein, 17 aa, Homo sapiens
RALTEELHQKVSEEAKS

SEQ ID NO: 2483 - protein, 13 aa, Homo sapiens
KILANVTEDAKRL

SEQ ID NO: 2484 - protein, 23 aa, Homo sapiens
KTSAYSRNDELNHLEEEGRFLKA

SEQ ID NO: 2485 - protein, 13 aa, Homo sapiens
RLLNFDTELSTKE

SEQ ID NO: 2486 - protein, 13 aa, Homo sapiens
RAAINKHIQTLRD

SEQ ID NO: 2487 - protein, 22 aa, Homo sapiens
RVMEELPLMLLSEFSLVDKLRI

SEQ ID NO: 2488 - protein, 38 aa, Homo sapiens; identical to SEQ ID NO: 169

SEQ ID NO: 2489 - protein, 18 aa, Homo sapiens
RAADFLSEPEGGPEMAKE

SEQ ID NO: 2490 - protein, 10 aa, Homo sapiens
REELLLLKKE

SEQ ID NO: 2491 - protein, 17 aa, Homo sapiens
RALTEELHQKVSEEAKS

SEQ ID NO: 2492 - protein, 19 aa, Homo sapiens
RVPELQGLVTEHVFLLDKC

SEQ ID NO: 2493 - protein, 13 aa, Homo sapiens
KFGIVLSAVITKS

SEQ ID NO: 2494 - protein, 20 aa, Homo sapiens
RDLVKQFQNVQQVEYSSIRG

SEQ ID NO: 2495 - protein, 25 aa, Homo sapiens
KQQGLRQDHPGQMDRYLVYGDEYKA

SEQ ID NO: 2496 - protein, 21 aa, Homo sapiens
RRVMEELPLMLLSEFSLVDKL

SEQ ID NO: 2497 - protein, 14 aa, Homo sapiens
RMKQPPATTPPFKT

SEQ ID NO: 2498 - protein, 14 aa, Homo sapiens
RSSLTLATAINQRG

SEQ ID NO: 2499 - protein, 23 aa, Homo sapiens
RQRHNSFADFLQAHLHTADLERH

SEQ ID NO: 2500 - protein, 25 aa, Homo sapiens
RAPKPTLLWLQQFDTEYSFLKEVRN

SEQ ID NO: 2501 - protein, 14 aa, Homo sapiens
RRLLQEQHQLSSRR

SEQ ID NO: 2502 - protein, 15 aa, Homo sapiens
RAQDLFLDGVPLRKT

SEQ ID NO: 2503 - protein, 20 aa, Homo sapiens
RGREPANEASVEYLQEVARI

SEQ ID NO: 2504 - protein, 18 aa, Homo sapiens
RATHYHLSSQVQEMAGKI

SEQ ID NO: 2505 - protein, 29 aa, Homo sapiens
RGIDKQGALLLEQDGVIKPWMGGEISLRS

SEQ ID NO: 2506 - protein, 13 aa, Homo sapiens
REEDLAPFSLRKR

SEQ ID NO: 2507 - protein, 14 aa, Homo sapiens
RDGFHLVKDKADRT

SEQ ID NO: 2508 - protein, 13 aa, Homo sapiens
RAAINKHIQTLRD

SEQ ID NO: 2509 - protein, 17 aa, Homo sapiens
RALTEELHQKVSEEAKS

SEQ ID NO: 2510 - protein, 21 aa, Homo sapiens
RGLSQEGTGPPTSAGEGHSRT

SEQ ID NO: 2511 - protein, 35 aa, Homo sapiens; identical to SEQ ID NO: 600

SEQ ID NO: 2512 - protein, 14 aa, Homo sapiens
RLGSIPLRQLVYRV

SEQ ID NO: 2513 - protein, 11 aa, Homo sapiens
RLESAGLGYRV

SEQ ID NO: 2514 - protein, 17 aa, Homo sapiens
RKRITVEYLQHIVEQKN

SEQ ID NO: 2515 - protein, 14 aa, Homo sapiens
RSAEKLQLPPLERL

SEQ ID NO: 2516 - protein, 16 aa, Homo sapiens
KTLPTMNNLISQDKRI

SEQ ID NO: 2517 - protein, 11 aa, Homo sapiens
KLLQDISEARC

SEQ ID NO: 2518 - protein, 22 aa, Homo sapiens
KVVGDLLSGTILVGQLELIIKH

SEQ ID NO: 2519 - protein, 12 aa, Homo sapiens
RFFPKPYDDSRL

SEQ ID NO: 2520 - protein, 35 aa, Homo sapiens; identical to SEQ ID NO: 600

SEQ ID NO: 2521 - protein, 18 aa, Homo sapiens
RDFATPSLHTSDQSPGKH

SEQ ID NO: 2522 - protein, 13 aa, Homo sapiens
REEDLAPFSLRKR

SEQ ID NO: 2523 - protein, 24 aa, Homo sapiens
KDLQQYVSVVVLDEVGLAEDSPKM

SEQ ID NO: 2524 - protein, 17 aa, Homo sapiens
RNDELNHLEEEGRFLKA

SEQ ID NO: 2525 - protein, 18 aa, Homo sapiens
RENSDVKTHGPFEAVMRT

SEQ ID NO: 2526 - protein, 17 aa, Homo sapiens
RRLLNFDTELSTKEMRN

SEQ ID NO: 2527 - protein, 22 aa, Homo sapiens
RNNWEKEIAAVISPELEHLDKT

SEQ ID NO: 2528 - protein, 29 aa, Homo sapiens
RGIDKQGALLLEQDGVIKPWMGGEISLRS

SEQ ID NO: 2529 - protein, 20 aa, Homo sapiens
KTIVADAMQGPAAYSDLFRS

SEQ ID NO: 2530 - protein, 11 aa, Homo sapiens
KHLLTLADVKH

SEQ ID NO: 2531 - protein, 18 aa, Homo sapiens
KTPQSQQSAYFLLTLFRE

SEQ ID NO: 2532 - protein, 23 aa, Homo sapiens
RLSAYSLGGFAAEWLSQEYFHRQ

SEQ ID NO: 2533 - protein, 17 aa, Homo sapiens
KVGFVGISNWALDPAKM

SEQ ID NO: 2534 - protein, 15 aa, Homo sapiens
RHDWNYEHLFMDIKN

SEQ ID NO: 2535 - protein, 15 aa, Homo sapiens
RAQDLFLDGVPLRKT

SEQ ID NO: 2536 - protein, 23 aa, Homo sapiens
KTSAYSRNDELNHLEEEGRFLKA

SEQ ID NO: 2537 - protein, 56 aa, Homo sapiens; identical to SEQ ID NO: 22

SEQ ID NO: 2538 - protein, 12 aa, Homo sapiens
RDLYQGLLLQRV

SEQ ID NO: 2539 - protein, 36 aa, Homo sapiens; identical to SEQ ID NO: 745

SEQ ID NO: 2540 - protein, 18 aa, Homo sapiens
KGFLQQHILKDLEQLAKM

SEQ ID NO: 2541 - protein, 71 aa, Homo sapiens; identical to SEQ ID NO: 21

SEQ ID NO: 2542 - protein, 12 aa, Homo sapiens
KALDKDQYLPRK

SEQ ID NO: 2543 - protein, 33 aa, Homo sapiens; identical to SEQ ID NO: 19

SEQ ID NO: 2544 - protein, 10 aa, Homo sapiens
REELLLLKKE

SEQ ID NO: 2545 - protein, 15 aa, Homo sapiens
KILIFQTDFEDGIRS

SEQ ID NO: 2546 - protein, 14 aa, Homo sapiens
RLHKEPFGEISSRY

SEQ ID NO: 2547 - protein, 25 aa, Homo sapiens
RAPKPTLLWLQQFDTEYSFLKEVRN

SEQ ID NO: 2548 - protein, 27 aa, Homo sapiens
RLIDPQVDESRVLGALLPFLDAQYQKV

SEQ ID NO: 2549 - protein, 16 aa, Homo sapiens
KQEESQFHPLEWLARE

SEQ ID NO: 2550 - protein, 11 aa, Homo sapiens
KLLQDISEARC

SEQ ID NO: 2551 - protein, 21 aa, Homo sapiens
KMLGHSADETIGVVHLVLRRL

SEQ ID NO: 2552 - protein, 29 aa, Homo sapiens
RGIDKQGALLLEQDGVIKPWMGGEISLRS

SEQ ID NO: 2553 - protein, 16 aa, Homo sapiens
KMQLNVKNVPLKTIRL

SEQ ID NO: 2554 - protein, 25 aa, Homo sapiens
KSSLLGSGDWHQYYDIVYMKPHGRL

SEQ ID NO: 2555 - protein, 15 aa, Homo sapiens
KLIIGDKEIFGISRG

SEQ ID NO: 2556 - protein, 18 aa, Homo sapiens
RAADFLSEPEGGPEMAKE

SEQ ID NO: 2557 - protein, 12 aa, Homo sapiens
KTHGPFEAVMRT

SEQ ID NO: 2558 - protein, 14 aa, Homo sapiens
RVKWPNDLYLQDRK

SEQ ID NO: 2559 - protein, 16 aa, Homo sapiens
RTRVPQFSFLDIFPKV

SEQ ID NO: 2560 - protein, 15 aa, Homo sapiens
RWEKLDNFINRPVKL

SEQ ID NO: 2561 - protein, 29 aa, Homo sapiens
RGIDKQGALLLEQDGVIKPWMGGEISLRS

SEQ ID NO: 2562 - protein, 14 aa, Homo sapiens
RDWGVDVFTVPGKG

SEQ ID NO: 2563 - protein, 18 aa, Homo sapiens
RAADFLSEPEGGPEMAKE

SEQ ID NO: 2564 - protein, 14 aa, Homo sapiens
RSSLTLATAINQRG

SEQ ID NO: 2565 - protein, 29 aa, Homo sapiens
RGIDKQGALLLEQDGVIKPWMGGEISLRS

SEQ ID NO: 2566 - protein, 17 aa, Homo sapiens
RNDELNHLEEEGRFLKA

SEQ ID NO: 2567 - protein, 16 aa, Homo sapiens
KGYSLPEPIPLLNAKQ

SEQ ID NO: 2568 - protein, 17 aa, Homo sapiens
RALTEELHQKVSEEAKS

SEQ ID NO: 2569 - protein, 14 aa, Homo sapiens
KGLEDSVAKTFEKC

SEQ ID NO: 2570 - protein, 21 aa, Homo sapiens
RHNSFADFLQAHLHTADLERH

SEQ ID NO: 2571 - protein, 14 aa, Homo sapiens
RVKWPNDLYLQDRK

SEQ ID NO: 2572 - protein, 18 aa, Homo sapiens
RILTIYPQVLHSLMEARW

SEQ ID NO: 2573 - protein, 17 aa, Homo sapiens
RALTEELHQKVSEEAKS

SEQ ID NO: 2574 - protein, 11 aa, Homo sapiens
RLESAGLGYRV

SEQ ID NO: 2575 - protein, 36 aa, Homo sapiens; identical to SEQ ID NO: 745

SEQ ID NO: 2576 - protein, 18 aa, Homo sapiens
RATHYHLSSQVQEMAGKI

SEQ ID NO: 2577 - protein, 21 aa, Homo sapiens
RHNSFADFLQAHLHTADLERH

SEQ ID NO: 2578 - protein, 15 aa, Homo sapiens
RHDWNYEHLFMDIKN

SEQ ID NO: 2579 - protein, 21 aa, Homo sapiens
RGIFVSRGSPNETELIESAKG

SEQ ID NO: 2580 - protein, 36 aa, Homo sapiens; identical to SEQ ID NO: 745

SEQ ID NO: 2581 - protein, 17 aa, Homo sapiens
RNDELNHLEEEGRFLKA

SEQ ID NO: 2582 - protein, 25 aa, Homo sapiens
KVGKETSELGGSDVSILDTTRLLRS

SEQ ID NO: 2583 - protein, 17 aa, Homo sapiens
RNTLKPSPQAWLQLVKN

SEQ ID NO: 2584 - protein, 17 aa, Homo sapiens
KIIYGDPVTFLPHLPRK

SEQ ID NO: 2585 - protein, 20 aa, Homo sapiens
RVMEELPLMLLSEFSLVDKL

SEQ ID NO: 2586 - protein, 13 aa, Homo sapiens
RAAINKHIQTLRD

SEQ ID NO: 2587 - protein, 12 aa, Homo sapiens
RSTLMVSDVTRL

SEQ ID NO: 2588 - protein, 30 aa, Homo sapiens; identical to SEQ ID NO: 940

SEQ ID NO: 2589 - protein, 33 aa, Homo sapiens; identical to SEQ ID NO: 19

SEQ ID NO: 2590 - protein, 29 aa, Homo sapiens
RGIDKQGALLLEQDGVIKPWMGGEISLRS

SEQ ID NO: 2591 - protein, 17 aa, Homo sapiens
KVMNHITDGPRKDLVKG

SEQ ID NO: 2592 - protein, 29 aa, Homo sapiens
RGIDKQGALLLEQDGVIKPWMGGEISLRS

SEQ ID NO: 2593 - protein, 14 aa, Homo sapiens
RVKWPNDLYLQDRK

SEQ ID NO: 2594 - protein, 17 aa, Homo sapiens
RVLGALLPFLDAQYQKV

SEQ ID NO: 2595 - protein, 15 aa, Homo sapiens
RKPSPQDIAQAVLRN

SEQ ID NO: 2596 - protein, 56 aa, Homo sapiens; identical to SEQ ID NO: 22

SEQ ID NO: 2597 - protein, 24 aa, Homo sapiens
KDLQQYVSVVVLDEVGLAEDSPKM

SEQ ID NO: 2598 - protein, 22 aa, Homo sapiens
RELRAALELFEQEGLAPYLPRW

SEQ ID NO: 2599 - protein, 29 aa, Homo sapiens
RGIDKQGALLLEQDGVIKPWMGGEISLRS

SEQ ID NO: 2600 - protein, 16 aa, Homo sapiens
RTEDAAQELLLPESKG

SEQ ID NO: 2601 - protein, 14 aa, Homo sapiens
RLHKEPFGEISSRY

SEQ ID NO: 2602 - protein, 17 aa, Homo sapiens
KVGFVGISNWALDPAKM

SEQ ID NO: 2603 - protein, 12 aa, Homo sapiens
RDSHIFQLFWRE

SEQ ID NO: 2604 - protein, 20 aa, Homo sapiens
RAADFLSEPEGGPEMAKEKQ

SEQ ID NO: 2605 - protein, 29 aa, Homo sapiens
KQILGQLDGGSVAVLPVVDSTNQYLLDRI

SEQ ID NO: 2606 - protein, 17 aa, Homo sapiens
RALTEELHQKVSEEAKS

SEQ ID NO: 2607 - protein, 14 aa, Homo sapiens
RMKQPPATTPPFKT

SEQ ID NO: 2608 - protein, 29 aa, Homo sapiens
RGIDKQGALLLEQDGVIKPWMGGEISLRS

SEQ ID NO: 2609 - protein, 13 aa, Homo sapiens
RYKADLSPENAKL

SEQ ID NO: 2610 - protein, 38 aa, Homo sapiens; identical to SEQ ID NO: 169

SEQ ID NO: 2611 - protein, 29 aa, Homo sapiens
RGIDKQGALLLEQDGVIKPWMGGEISLRS

SEQ ID NO: 2612 - protein, 15 aa, Homo sapiens
RVKWPNDLYLQDRKL

SEQ ID NO: 2613 - protein, 34 aa, Homo sapiens; identical to SEQ ID NO: 193

SEQ ID NO: 2614 - protein, 20 aa, Homo sapiens
KTIVADAMQGPAAYSDLFRS

SEQ ID NO: 2615 - protein, 29 aa, Homo sapiens
KQILGQLDGGSVAVLPVVDSTNQYLLDRI

SEQ ID NO: 2616 - protein, 56 aa, Homo sapiens; identical to SEQ ID NO: 22

SEQ ID NO: 2617 - protein, 14 aa, Homo sapiens
RLHKEPFGEISSRY

SEQ ID NO: 2618 - protein, 29 aa, Homo sapiens
RGIDKQGALLLEQDGVIKPWMGGEISLRS

SEQ ID NO: 2619 - protein, 20 aa, Homo sapiens
RAADFLSEPEGGPEMAKEKQ

SEQ ID NO: 2620 - protein, 22 aa, Homo sapiens
RGPAAIGLGPVIGIVMAEALRK

SEQ ID NO: 2621 - protein, 36 aa, Homo sapiens; identical to SEQ ID NO: 745

SEQ ID NO: 2622 - protein, 14 aa, Homo sapiens
RRLLNFDTELSTKE

SEQ ID NO: 2623 - protein, 22 aa, Homo sapiens
RAPKPTLLWLQQFDTEYSFLKE

SEQ ID NO: 2624 - protein, 23 aa, Homo sapiens
KRGPAAIGLGPVIGIVMAEALRK

SEQ ID NO: 2625 - protein, 29 aa, Homo sapiens
RGIDKQGALLLEQDGVIKPWMGGEISLRS

SEQ ID NO: 2626 - protein, 14 aa, Homo sapiens
RYLVYGDEYKALRD

SEQ ID NO: 2627 - protein, 25 aa, Homo sapiens
KSSLLGSGDWHQYYDIVYMKPHGRL

SEQ ID NO: 2628 - protein, 16 aa, Homo sapiens
RFATSLVDNSVPLLRA

SEQ ID NO: 2629 - protein, 15 aa, Homo sapiens
RGSPNETELIESAKG

SEQ ID NO: 2630 - protein, 17 aa, Homo sapiens
KIIYGDPVTFLPHLPRK

SEQ ID NO: 2631 - protein, 21 aa, Homo sapiens
RHNSFADFLQAHLHTADLERH

SEQ ID NO: 2632 - protein, 15 aa, Homo sapiens
RAQDLFLDGVPLRKT

SEQ ID NO: 2633 - protein, 17 aa, Homo sapiens
KVMNHITDGPRKDLVKG

SEQ ID NO: 2634 - protein, 11 aa, Homo sapiens
RLESAGLGYRV

SEQ ID NO: 2635 - protein, 22 aa, Homo sapiens
RELRAALELFEQEGLAPYLPRW

SEQ ID NO: 2636 - protein, 29 aa, Homo sapiens
RGIDKQGALLLEQDGVIKPWMGGEISLRS

SEQ ID NO: 2637 - protein, 15 aa, Homo sapiens
KKFVDIFQQTPLGRF

SEQ ID NO: 2638 - protein, 16 aa, Homo sapiens
KQEESQFHPLEWLARE

SEQ ID NO: 2639 - protein, 15 aa, Homo sapiens
KIPLFLVGKPGSSKS

SEQ ID NO: 2640 - protein, 24 aa, Homo sapiens
RDLYQGLLLQRVPFNVDFDKLPRH

SEQ ID NO: 2641 - protein, 22 aa, Homo sapiens
RVMEELPLMLLSEFSLVDKLRI

SEQ ID NO: 2642 - protein, 14 aa, Homo sapiens
RLHKEPFGEISSRY

SEQ ID NO: 2643 - protein, 21 aa, Homo sapiens
RTADNFDDILKHLLTLADVKH

SEQ ID NO: 2644 - protein, 18 aa, Homo sapiens
RVSMEETADRLGSIPLRQ

SEQ ID NO: 2645 - protein, 22 aa, Homo sapiens
KVGKETSELGGSDVSILDTTRL

SEQ ID NO: 2646 - protein, 25 aa, Homo sapiens
KLKAASEAPEEEVSLPWVHLAYQRF

SEQ ID NO: 2647 - protein, 19 aa, Homo sapiens
RHSQDLSSKRLNDTVTVRL

SEQ ID NO: 2648 - protein, 12 aa, Homo sapiens
RDLYQGLLLQRV

SEQ ID NO: 2649 - protein, 22 aa, Homo sapiens
RGPAAIGLGPVIGIVMAEALRK

SEQ ID NO: 2650 - protein, 59 aa, Homo sapiens; identical to SEQ ID NO: 88

SEQ ID NO: 2651 - protein, 14 aa, Homo sapiens
RVPFNVDFDKLPRH

SEQ ID NO: 2652 - protein, 34 aa, Homo sapiens; identical to SEQ ID NO: 40

SEQ ID NO: 2653 - protein, 18 aa, Homo sapiens
RILTIYPQVLHSLMEARW

SEQ ID NO: 2654 - protein, 34 aa, Homo sapiens; identical to SEQ ID NO: 67

SEQ ID NO: 2655 - protein, 29 aa, Homo sapiens
RGIDKQGALLLEQDGVIKPWMGGEISLRS

SEQ ID NO: 2656 - protein, 14 aa, Homo sapiens
RSAEKLQLPPLERL

SEQ ID NO: 2657 - protein, 15 aa, Homo sapiens
KLIIGDKEIFGISRG

SEQ ID NO: 2658 - protein, 29 aa, Homo sapiens
KQILGQLDGGSVAVLPVVDSTNQYLLDRI

SEQ ID NO: 2659 - protein, 15 aa, Homo sapiens
RAQDLFLDGVPLRKT

SEQ ID NO: 2660 - protein, 16 aa, Homo sapiens
KTLPTMNNLISQDKRI

SEQ ID NO: 2661 - protein, 29 aa, Homo sapiens
KQILGQLDGGSVAVLPVVDSTNQYLLDRI

SEQ ID NO: 2662 - protein, 14 aa, Homo sapiens
RHAIFTEITTFSRL

SEQ ID NO: 2663 - protein, 56 aa, Homo sapiens; identical to SEQ ID NO: 22

SEQ ID NO: 2664 - protein, 14 aa, Homo sapiens
RLHKEPFGEISSRY

SEQ ID NO: 2665 - protein, 17 aa, Homo sapiens
RALTEELHQKVSEEAKS

SEQ ID NO: 2666 - protein, 22 aa, Homo sapiens
RLLLDEITRAQDLFLDGVPLRK

SEQ ID NO: 2667 - protein, 16 aa, Homo sapiens
RFATSLVDNSVPLLRA

SEQ ID NO: 2668 - protein, 26 aa, Homo sapiens
KLIALLANGEFHSGEQLGETLGMSRA

SEQ ID NO: 2669 - protein, 15 aa, Homo sapiens
RITVEYLQHIVEQKN

SEQ ID NO: 2670 - protein, 29 aa, Homo sapiens
RGIDKQGALLLEQDGVIKPWMGGEISLRS

SEQ ID NO: 2671 - protein, 23 aa, Homo sapiens
RGMEFVQGLSKPGRPHQWVFPKD

SEQ ID NO: 2672 - protein, 20 aa, Homo sapiens
RGREPANEASVEYLQEVARI

SEQ ID NO: 2673 - protein, 17 aa, Homo sapiens
KIIYGDPVTFLPHLPRK

SEQ ID NO: 2674 - protein, 56 aa, Homo sapiens; identical to SEQ ID NO: 22

SEQ ID NO: 2675 - protein, 25 aa, Homo sapiens
RAPKPTLLWLQQFDTEYSFLKEVRN

SEQ ID NO: 2676 - protein, 15 aa, Homo sapiens
RVKWPNDLYLQDRKL

SEQ ID NO: 2677 - protein, 21 aa, Homo sapiens
RGLSQEGTGPPTSAGEGHSRT

SEQ ID NO: 2678 - protein, 23 aa, Homo sapiens
RRVMEELPLMLLSEFSLVDKLRI

SEQ ID NO: 2679 - protein, 23 aa, Homo sapiens
KDNAPPEKEVIESLLSLLFVQKG

SEQ ID NO: 2680 - protein, 36 aa, Homo sapiens; identical to SEQ ID NO: 745

SEQ ID NO: 2681 - protein, 17 aa, Homo sapiens
KVGFVGISNWALDPAKM

SEQ ID NO: 2682 - protein, 23 aa, Homo sapiens
RQRHNSFADFLQAHLHTADLERH

SEQ ID NO: 2683 - protein, 18 aa, Homo sapiens
KADRTQTGHVLGNPQRRD

SEQ ID NO: 2684 - protein, 17 aa, Homo sapiens
KEIAAVISPELEHLDKT

SEQ ID NO: 2685 - protein, 56 aa, Homo sapiens; identical to SEQ ID NO: 22

SEQ ID NO: 2686 - protein, 29 aa, Homo sapiens
RFQQGKDLQQYVSVVVLDEVGLAEDSPKM

SEQ ID NO: 2687 - protein, 11 aa, Homo sapiens
KLYIQQIVQRL

SEQ ID NO: 2688 - protein, 29 aa, Homo sapiens
KQILGQLDGGSVAVLPVVDSTNQYLLDRI

SEQ ID NO: 2689 - protein, 16 aa, Homo sapiens
KGYSLPEPIPLLNAKQ

SEQ ID NO: 2690 - protein, 36 aa, Homo sapiens; identical to SEQ ID NO: 745

SEQ ID NO: 2691 - protein, 25 aa, Homo sapiens
KLKAASEAPEEEVSLPWVHLAYQRF

SEQ ID NO: 2692 - protein, 29 aa, Homo sapiens
RGIDKQGALLLEQDGVIKPWMGGEISLRS

SEQ ID NO: 2693 - protein, 16 aa, Homo sapiens
REQMLDTSSLLQFMRE

SEQ ID NO: 2694 - protein, 18 aa, Homo sapiens
RENSDVKTHGPFEAVMRT

SEQ ID NO: 2695 - protein, 59 aa, Homo sapiens; identical to SEQ ID NO: 88

SEQ ID NO: 2696 - protein, 21 aa, Homo sapiens
RHNSFADFLQAHLHTADLERH

SEQ ID NO: 2697 - protein, 23 aa, Homo sapiens
RATHYHLSSQVQEMAGKIDLLRD

SEQ ID NO: 2698 - protein, 31 aa, Homo sapiens; identical to SEQ ID NO: 27

SEQ ID NO: 2699 - protein, 14 aa, Homo sapiens
RSLETNGEINLPKD

SEQ ID NO: 2700 - protein, 28 aa, Homo sapiens
RDWGVDVFTVPGKGYSLPEPIPLLNAKQ

SEQ ID NO: 2701 - protein, 29 aa, Homo sapiens
RGIDKQGALLLEQDGVIKPWMGGEISLRS

SEQ ID NO: 2702 - protein, 20 aa, Homo sapiens
KTIVADAMQGPAAYSDLFRS

SEQ ID NO: 2703 - protein, 19 aa, Homo sapiens
KETSELGGSDVSILDTTRL

SEQ ID NO: 2704 - protein, 29 aa, Homo sapiens
RGIDKQGALLLEQDGVIKPWMGGEISLRS

SEQ ID NO: 2705 - protein, 29 aa, Homo sapiens
KQILGQLDGGSVAVLPVVDSTNQYLLDRI

SEQ ID NO: 2706 - protein, 17 aa, Homo sapiens
RALTEELHQKVSEEAKS

SEQ ID NO: 2707 - protein, 23 aa, Homo sapiens
KVFVTPQAPLEAIQAYLAGHYRV

SEQ ID NO: 2708 - protein, 14 aa, Homo sapiens
RSSLTLATAINQRG

SEQ ID NO: 2709 - protein, 23 aa, Homo sapiens
RGMEFVQGLSKPGRPHQWVFPKD

SEQ ID NO: 2710 - protein, 14 aa, Homo sapiens
RVPQFSFLDIFPKV

SEQ ID NO: 2711 - protein, 13 aa, Homo sapiens
KEVIDMELSALRS

SEQ ID NO: 2712 - protein, 28 aa, Homo sapiens
KDLQQYVSVVVLDEVGLAEDSPKMPLKT

SEQ ID NO: 2713 - protein, 14 aa, Homo sapiens
KQTLSAAAVFNDRL

SEQ ID NO: 2714 - protein, 29 aa, Homo sapiens
KQILGQLDGGSVAVLPVVDSTNQYLLDRI

SEQ ID NO: 2715 - protein, 44 aa, Homo sapiens; identical to SEQ ID NO: 34

SEQ ID NO: 2716 - protein, 17 aa, Homo sapiens
KVGFVGISNWALDPAKM

SEQ ID NO: 2717 - protein, 23 aa, Homo sapiens
KAASEAPEEEVSLPWVHLAYQRF

SEQ ID NO: 2718 - protein, 29 aa, Homo sapiens
RGIDKQGALLLEQDGVIKPWMGGEISLRS

SEQ ID NO: 2719 - protein, 28 aa, Homo sapiens
KNLAFSPATMAHAFLPTMPEDLLAQARR

SEQ ID NO: 2720 - protein, 45 aa, Homo sapiens; identical to SEQ ID NO: 178

SEQ ID NO: 2721 - protein, 24 aa, Homo sapiens
RDLYQGLLLQRVPFNVDFDKLPRH

SEQ ID NO: 2722 - protein, 23 aa, Homo sapiens
RQRHNSFADFLQAHLHTADLERH

SEQ ID NO: 2723 - protein, 56 aa, Homo sapiens; identical to SEQ ID NO: 22

SEQ ID NO: 2724 - protein, 14 aa, Homo sapiens
RLHKEPFGEISSRY

SEQ ID NO: 2725 - protein, 56 aa, Homo sapiens; identical to SEQ ID NO: 22

SEQ ID NO: 2726 - protein, 15 aa, Homo sapiens
KLIIGDKEIFGISRG

SEQ ID NO: 2727 - protein, 30 aa, Homo sapiens; identical to SEQ ID NO: 1299

SEQ ID NO: 2728 - protein, 29 aa, Homo sapiens
KQILGQLDGGSVAVLPVVDSTNQYLLDRI

SEQ ID NO: 2729 - protein, 17 aa, Homo sapiens
RNDELNHLEEEGRFLKA

SEQ ID NO: 2730 - protein, 14 aa, Homo sapiens
RYLVYGDEYKALRD

SEQ ID NO: 2731 - protein, 15 aa, Homo sapiens
REYSLEEVKELLNKL

SEQ ID NO: 2732 - protein, 20 aa, Homo sapiens
KVGFVGISNWALDPAKMNRG

SEQ ID NO: 2733 - protein, 33 aa, Homo sapiens; identical to SEQ ID NO: 152

SEQ ID NO: 2734 - protein, 34 aa, Homo sapiens; identical to SEQ ID NO: 67

SEQ ID NO: 2735 - protein, 18 aa, Homo sapiens
RENSDVKTHGPFEAVMRT

SEQ ID NO: 2736 - protein, 29 aa, Homo sapiens
KQILGQLDGGSVAVLPVVDSTNQYLLDRI

SEQ ID NO: 2737 - protein, 15 aa, Homo sapiens
RVKWPNDLYLQDRKL

SEQ ID NO: 2738 - protein, 15 aa, Homo sapiens
RGSPNETELIESAKG

SEQ ID NO: 2739 - protein, 29 aa, Homo sapiens
RGIDKQGALLLEQDGVIKPWMGGEISLRS

SEQ ID NO: 2740 - protein, 33 aa, Homo sapiens; identical to SEQ ID NO: 152

SEQ ID NO: 2741 - protein, 17 aa, Homo sapiens
RETLDQINQELIQAKKL

SEQ ID NO: 2742 - protein, 16 aa, Homo sapiens
KRITVEYLQHIVEQKN

SEQ ID NO: 2743 - protein, 14 aa, Homo sapiens
RSAEKLQLPPLERL

SEQ ID NO: 2744 - protein, 21 aa, Homo sapiens
KMLGHSADETIGVVHLVLRRL

SEQ ID NO: 2745 - protein, 26 aa, Homo sapiens
RKLKAASEAPEEEVSLPWVHLAYQRF

SEQ ID NO: 2746 - protein, 56 aa, Homo sapiens; identical to SEQ ID NO: 22

SEQ ID NO: 2747 - protein, 15 aa, Homo sapiens
KLIIGDKEIFGISRG

SEQ ID NO: 2748 - protein, 29 aa, Homo sapiens
RGIDKQGALLLEQDGVIKPWMGGEISLRS

SEQ ID NO: 2749 - protein, 25 aa, Homo sapiens
KLKAASEAPEEEVSLPWVHLAYQRF

SEQ ID NO: 2750 - protein, 15 aa, Homo sapiens
RAQDLFLDGVPLRKT

SEQ ID NO: 2751 - protein, 36 aa, Homo sapiens; identical to SEQ ID NO: 745

SEQ ID NO: 2752 - protein, 12 aa, Homo sapiens
KKLLQDISEARC

SEQ ID NO: 2753 - protein, 36 aa, Homo sapiens; identical to SEQ ID NO: 745

SEQ ID NO: 2754 - protein, 22 aa, Homo sapiens
RLLLDEITRAQDLFLDGVPLRK

SEQ ID NO: 2755 - protein, 13 aa, Homo sapiens
KILANVTEDAKRL

SEQ ID NO: 2756 - protein, 20 aa, Homo sapiens
KTIVADAMQGPAAYSDLFRS

SEQ ID NO: 2757 - protein, 17 aa, Homo sapiens
RNTLKPSPQAWLQLVKN

SEQ ID NO: 2758 - protein, 22 aa, Homo sapiens
RNNWEKEIAAVISPELEHLDKT

SEQ ID NO: 2759 - protein, 31 aa, Homo sapiens; identical to SEQ ID NO: 27

SEQ ID NO: 2760 - protein, 20 aa, Homo sapiens
KTIVADAMQGPAAYSDLFRS

SEQ ID NO: 2761 - protein, 22 aa, Homo sapiens
RVMEELPLMLLSEFSLVDKLRI

SEQ ID NO: 2762 - protein, 33 aa, Homo sapiens; identical to SEQ ID NO: 19

SEQ ID NO: 2763 - protein, 16 aa, Homo sapiens
RFATSLVDNSVPLLRA

SEQ ID NO: 2764 - protein, 38 aa, Homo sapiens; identical to SEQ ID NO: 169

SEQ ID NO: 2765 - protein, 29 aa, Homo sapiens
KQILGQLDGGSVAVLPVVDSTNQYLLDRI

SEQ ID NO: 2766 - protein, 29 aa, Homo sapiens
RGIDKQGALLLEQDGVIKPWMGGEISLRS

SEQ ID NO: 2767 - protein, 56 aa, Homo sapiens; identical to SEQ ID NO: 22

SEQ ID NO: 2768 - protein, 29 aa, Homo sapiens
RGIDKQGALLLEQDGVIKPWMGGEISLRS

SEQ ID NO: 2769 - protein, 17 aa, Homo sapiens
KIIYGDPVTFLPHLPRK

SEQ ID NO: 2770 - protein, 14 aa, Homo sapiens
RVPFNVDFDKLPRH

SEQ ID NO: 2771 - protein, 24 aa, Homo sapiens
RNFSGKDDIQALDIFLANLPEAKC

SEQ ID NO: 2772 - protein, 28 aa, Homo sapiens
KDLQQYVSVVVLDEVGLAEDSPKMPLKT

SEQ ID NO: 2773 - protein, 29 aa, Homo sapiens
RGIDKQGALLLEQDGVIKPWMGGEISLRS

SEQ ID NO: 2774 - protein, 31 aa, Homo sapiens; identical to SEQ ID NO: 27

SEQ ID NO: 2775 - protein, 36 aa, Homo sapiens; identical to SEQ ID NO: 745

SEQ ID NO: 2776 - protein, 14 aa, Homo sapiens
RLSLKGIPTLVYRH

SEQ ID NO: 2777 - protein, 20 aa, Homo sapiens
KTIVADAMQGPAAYSDLFRS

SEQ ID NO: 2778 - protein, 38 aa, Homo sapiens; identical to SEQ ID NO: 169

SEQ ID NO: 2779 - protein, 29 aa, Homo sapiens
RGIDKQGALLLEQDGVIKPWMGGEISLRS

SEQ ID NO: 2780 - protein, 38 aa, Homo sapiens; identical to SEQ ID NO: 169

SEQ ID NO: 2781 - protein, 18 aa, Homo sapiens
RATHYHLSSQVQEMAGKI

SEQ ID NO: 2782 - protein, 20 aa, Homo sapiens
KDVVKQQGLRQDHPGQMDRY

SEQ ID NO: 2783 - protein, 28 aa, Homo sapiens
RDWGVDVFTVPGKGYSLPEPIPLLNAKQ

SEQ ID NO: 2784 - protein, 18 aa, Homo sapiens
RAADFLSEPEGGPEMAKE

SEQ ID NO: 2785 - protein, 29 aa, Homo sapiens
RGIDKQGALLLEQDGVIKPWMGGEISLRS

SEQ ID NO: 2786 - protein, 38 aa, Homo sapiens; identical to SEQ ID NO: 169

SEQ ID NO: 2787 - protein, 20 aa, Homo sapiens
KTIVADAMQGPAAYSDLFRS

SEQ ID NO: 2788 - protein, 29 aa, Homo sapiens
KQILGQLDGGSVAVLPVVDSTNQYLLDRI

SEQ ID NO: 2789 - protein, 33 aa, Homo sapiens; identical to SEQ ID NO: 28

SEQ ID NO: 2790 - protein, 35 aa, Homo sapiens; identical to SEQ ID NO: 1014

SEQ ID NO: 2791 - protein, 18 aa, Homo sapiens
RENSDVKTHGPFEAVMRT

SEQ ID NO: 2792 - protein, 29 aa, Homo sapiens
RGIDKQGALLLEQDGVIKPWMGGEISLRS

SEQ ID NO: 2793 - protein, 17 aa, Homo sapiens
KEIAAVISPELEHLDKT

SEQ ID NO: 2794 - protein, 18 aa, Homo sapiens
KIIYGDPVTFLPHLPRKS

SEQ ID NO: 2795 - protein, 24 aa, Homo sapiens
RDLYQGLLLQRVPFNVDFDKLPRH

SEQ ID NO: 2796 - protein, 20 aa, Homo sapiens
KTIVADAMQGPAAYSDLFRS

SEQ ID NO: 2797 - protein, 14 aa, Homo sapiens
KQTLSAAAVFNDRL

SEQ ID NO: 2798 - protein, 15 aa, Homo sapiens
RITVEYLQHIVEQKN

SEQ ID NO: 2799 - protein, 23 aa, Homo sapiens
RLLLDEITRAQDLFLDGVPLRKT

SEQ ID NO: 2800 - protein, 29 aa, Homo sapiens
KQILGQLDGGSVAVLPVVDSTNQYLLDRI

SEQ ID NO: 2801 - protein, 20 aa, Homo sapiens
RAADFLSEPEGGPEMAKEKQ

SEQ ID NO: 2802 - protein, 20 aa, Homo sapiens
KTIVADAMQGPAAYSDLFRS

SEQ ID NO: 2803 - protein, 59 aa, Homo sapiens; identical to SEQ ID NO: 88

SEQ ID NO: 2804 - protein, 29 aa, Homo sapiens
KQILGQLDGGSVAVLPVVDSTNQYLLDRI

SEQ ID NO: 2805 - protein, 18 aa, Homo sapiens
KIIYGDPVTFLPHLPRKS

SEQ ID NO: 2806 - protein, 29 aa, Homo sapiens
KQILGQLDGGSVAVLPVVDSTNQYLLDRI

SEQ ID NO: 2807 - protein, 16 aa, Homo sapiens
RFATSLVDNSVPLLRA

SEQ ID NO: 2808 - protein, 16 aa, Homo sapiens
KQFQNVQQVEYSSIRG

SEQ ID NO: 2809 - protein, 29 aa, Homo sapiens
KQILGQLDGGSVAVLPVVDSTNQYLLDRI

SEQ ID NO: 2810 - protein, 15 aa, Homo sapiens
RITVEYLQHIVEQKN

SEQ ID NO: 2811 - protein, 44 aa, Homo sapiens; identical to SEQ ID NO: 34

SEQ ID NO: 2812 - protein, 29 aa, Homo sapiens
RGIDKQGALLLEQDGVIKPWMGGEISLRS

SEQ ID NO: 2813 - protein, 16 aa, Homo sapiens
REQMLDTSSLLQFMRE

SEQ ID NO: 2814 - protein, 20 aa, Homo sapiens
RIFSTALFVEHVLLGTESRV

SEQ ID NO: 2815 - protein, 23 aa, Homo sapiens
KAASEAPEEEVSLPWVHLAYQRF

SEQ ID NO: 2816 - protein, 15 aa, Homo sapiens
RGSPNETELIESAKG

SEQ ID NO: 2817 - protein, 29 aa, Homo sapiens
RGIDKQGALLLEQDGVIKPWMGGEISLRS

SEQ ID NO: 2818 - protein, 17 aa, Homo sapiens
RALTEELHQKVSEEAKS

SEQ ID NO: 2819 - protein, 20 aa, Homo sapiens
KVGFVGISNWALDPAKMNRG

SEQ ID NO: 2820 - protein, 14 aa, Homo sapiens
RSSLTLATAINQRG

SEQ ID NO: 2821 - protein, 45 aa, Homo sapiens; identical to SEQ ID NO: 178

SEQ ID NO: 2822 - protein, 29 aa, Homo sapiens
RGIDKQGALLLEQDGVIKPWMGGEISLRS

SEQ ID NO: 2823 - protein, 14 aa, Homo sapiens
RGGTNADTIKLVKV

SEQ ID NO: 2824 - protein, 18 aa, Homo sapiens
RAADFLSEPEGGPEMAKE

SEQ ID NO: 2825 - protein, 29 aa, Homo sapiens
RFQQGKDLQQYVSVVVLDEVGLAEDSPKM

SEQ ID NO: 2826 - protein, 31 aa, Homo sapiens; identical to SEQ ID NO: 957

SEQ ID NO: 2827 - protein, 29 aa, Homo sapiens
KQILGQLDGGSVAVLPVVDSTNQYLLDRI

SEQ ID NO: 2828 - protein, 15 aa, Homo sapiens
KLIIGDKEIFGISRG

SEQ ID NO: 2829 - protein, 15 aa, Homo sapiens
RAQDLFLDGVPLRKT

SEQ ID NO: 2830 - protein, 34 aa, Homo sapiens; identical to SEQ ID NO: 67

SEQ ID NO: 2831 - protein, 35 aa, Homo sapiens; identical to SEQ ID NO: 600

SEQ ID NO: 2832 - protein, 15 aa, Homo sapiens
RITVEYLQHIVEQKN

SEQ ID NO: 2833 - protein, 15 aa, Homo sapiens
RGSPNETELIESAKG

SEQ ID NO: 2834 - protein, 23 aa, Homo sapiens
RLSAYSLGGFAAEWLSQEYFHRQ

SEQ ID NO: 2835 - protein, 36 aa, Homo sapiens; identical to SEQ ID NO: 745

SEQ ID NO: 2836 - protein, 20 aa, Homo sapiens
RAADFLSEPEGGPEMAKEKQ

SEQ ID NO: 2837 - protein, 13 aa, Homo sapiens
RLLQEQHQLSSRR

SEQ ID NO: 2838 - protein, 34 aa, Homo sapiens; identical to SEQ ID NO: 40

SEQ ID NO: 2839 - protein, 29 aa, Homo sapiens
RGIDKQGALLLEQDGVIKPWMGGEISLRS

SEQ ID NO: 2840 - protein, 21 aa, Homo sapiens
RTADNFDDILKHLLTLADVKH

SEQ ID NO: 2841 - protein, 24 aa, Homo sapiens
RNFSGKDDIQALDIFLANLPEAKC

SEQ ID NO: 2842 - protein, 56 aa, Homo sapiens; identical to SEQ ID NO: 22

SEQ ID NO: 2843 - protein, 15 aa, Homo sapiens
RGIYVIQAPKGGQKI

SEQ ID NO: 2844 - protein, 29 aa, Homo sapiens
RGIDKQGALLLEQDGVIKPWMGGEISLRS

SEQ ID NO: 2845 - protein, 30 aa, Homo sapiens; identical to SEQ ID NO: 940

SEQ ID NO: 2846 - protein, 29 aa, Homo sapiens
RGIDKQGALLLEQDGVIKPWMGGEISLRS

SEQ ID NO: 2847 - protein, 29 aa, Homo sapiens
KNLAFSPATMAHAFLPTMPEDLLAQARRW

SEQ ID NO: 2848 - protein, 20 aa, Homo sapiens
KTIVADAMQGPAAYSDLFRS

SEQ ID NO: 2849 - protein, 35 aa, Homo sapiens; identical to SEQ ID NO: 600

SEQ ID NO: 2850 - protein, 29 aa, Homo sapiens
RGIDKQGALLLEQDGVIKPWMGGEISLRS

SEQ ID NO: 2851 - protein, 29 aa, Homo sapiens
RGIDKQGALLLEQDGVIKPWMGGEISLRS

SEQ ID NO: 2852 - protein, 25 aa, Homo sapiens
KQGALLLEQDGVIKPWMGGEISLRS

SEQ ID NO: 2853 - protein, 14 aa, Homo sapiens
RSSLTLATAINQRG

SEQ ID NO: 2854 - protein, 18 aa, Homo sapiens
RVSMEETADRLGSIPLRQ

SEQ ID NO: 2855 - protein, 29 aa, Homo sapiens
RGIDKQGALLLEQDGVIKPWMGGEISLRS

SEQ ID NO: 2856 - protein, 29 aa, Homo sapiens
RGIDKQGALLLEQDGVIKPWMGGEISLRS

SEQ ID NO: 2857 - protein, 29 aa, Homo sapiens
RGIDKQGALLLEQDGVIKPWMGGEISLRS

SEQ ID NO: 2858 - protein, 29 aa, Homo sapiens
KQILGQLDGGSVAVLPVVDSTNQYLLDRI

SEQ ID NO: 2859 - protein, 28 aa, Homo sapiens
KNLAFSPATMAHAFLPTMPEDLLAQARR

SEQ ID NO: 2860 - protein, 28 aa, Homo sapiens
KDLQQYVSVVVLDEVGLAEDSPKMPLKT

SEQ ID NO: 2861 - protein, 35 aa, Homo sapiens; identical to SEQ ID NO: 1014

SEQ ID NO: 2862 - protein, 29 aa, Homo sapiens
RGIDKQGALLLEQDGVIKPWMGGEISLRS

SEQ ID NO: 2863 - protein, 19 aa, Homo sapiens
KASNRKPSPQDIAQAVLRN

SEQ ID NO: 2864 - protein, 35 aa, Homo sapiens; identical to SEQ ID NO: 1242

SEQ ID NO: 2865 - protein, 15 aa, Homo sapiens
KLIIGDKEIFGISRG

SEQ ID NO: 2866 - protein, 35 aa, Homo sapiens; identical to SEQ ID NO: 1242

SEQ ID NO: 2867 - protein, 71 aa, Homo sapiens; identical to SEQ ID NO: 21

SEQ ID NO: 2868 - protein, 45 aa, Homo sapiens; identical to SEQ ID NO: 1186

SEQ ID NO: 2869 - protein, 56 aa, Homo sapiens; identical to SEQ ID NO: 22

SEQ ID NO: 2870 - protein, 15 aa, Homo sapiens
RAQDLFLDGVPLRKT

SEQ ID NO: 2871 - protein, 45 aa, Homo sapiens; identical to SEQ ID NO: 178

SEQ ID NO: 2872 - protein, 25 aa, Homo sapiens
RLQHVTISQLFAPGDLPELGLEHRA

SEQ ID NO: 2873 - protein, 62 aa, Homo sapiens; identical to SEQ ID NO: 1391

SEQ ID NO: 2874 - protein, 29 aa, Homo sapiens
KQILGQLDGGSVAVLPVVDSTNQYLLDRI

SEQ ID NO: 2875 - protein, 34 aa, Homo sapiens; identical to SEQ ID NO: 40

SEQ ID NO: 2876 - protein, 29 aa, Homo sapiens
KQILGQLDGGSVAVLPVVDSTNQYLLDRI

SEQ ID NO: 2877 - protein, 20 aa, Homo sapiens
KMLGHSADETIGVVHLVLRR

SEQ ID NO: 2878 - protein, 56 aa, Homo sapiens; identical to SEQ ID NO: 22

SEQ ID NO: 2879 - protein, 56 aa, Homo sapiens; identical to SEQ ID NO: 22

SEQ ID NO: 2880 - protein, 24 aa, Homo sapiens
KISPDTVLHLILPESPGSHEESRE

SEQ ID NO: 2881 - protein, 35 aa, Homo sapiens; identical to SEQ ID NO: 1234

SEQ ID NO: 2882 - protein, 29 aa, Homo sapiens
RGIDKQGALLLEQDGVIKPWMGGEISLRS

SEQ ID NO: 2883 - protein, 23 aa, Homo sapiens
RGMEFVQGLSKPGRPHQWVFPKD

SEQ ID NO: 2884 - protein, 18 aa, Homo sapiens
KGFLQQHILKDLEQLAKM

SEQ ID NO: 2885 - protein, 12 aa, Homo sapiens
KYVDLGLGTHRV

SEQ ID NO: 2886 - protein, 29 aa, Homo sapiens
RGIDKQGALLLEQDGVIKPWMGGEISLRS

SEQ ID NO: 2887 - protein, 25 aa, Homo sapiens
KLKAASEAPEEEVSLPWVHLAYQRF

SEQ ID NO: 2888 - protein, 16 aa, Homo sapiens
RTEDAAQELLLPESKG

SEQ ID NO: 2889 - protein, 29 aa, Homo sapiens
RGIDKQGALLLEQDGVIKPWMGGEISLRS

SEQ ID NO: 2890 - protein, 20 aa, Homo sapiens
KTIVADAMQGPAAYSDLFRS

SEQ ID NO: 2891 - protein, 22 aa, Homo sapiens
KVGKETSELGGSDVSILDTTRL

SEQ ID NO: 2892 - protein, 17 aa, Homo sapiens
RNTLKPSPQAWLQLVKN

SEQ ID NO: 2893 - protein, 16 aa, Homo sapiens
KGYSLPEPIPLLNAKQ

SEQ ID NO: 2894 - protein, 15 aa, Homo sapiens
RITVEYLQHIVEQKN

SEQ ID NO: 2895 - protein, 29 aa, Homo sapiens
RGIDKQGALLLEQDGVIKPWMGGEISLRS

SEQ ID NO: 2896 - protein, 23 aa, Homo sapiens
RRVMEELPLMLLSEFSLVDKLRI

SEQ ID NO: 2897 - protein, 15 aa, Homo sapiens
KLIIGDKEIFGISRG

SEQ ID NO: 2898 - protein, 29 aa, Homo sapiens
RGIDKQGALLLEQDGVIKPWMGGEISLRS

SEQ ID NO: 2899 - protein, 33 aa, Homo sapiens; identical to SEQ ID NO: 152

SEQ ID NO: 2900 - protein, 25 aa, Homo sapiens
KLKAASEAPEEEVSLPWVHLAYQRF

SEQ ID NO: 2901 - protein, 22 aa, Homo sapiens
RNNWEKEIAAVISPELEHLDKT

SEQ ID NO: 2902 - protein, 14 aa, Homo sapiens
RSAEKLQLPPLERL

SEQ ID NO: 2903 - protein, 39 aa, Homo sapiens; identical to SEQ ID NO: 496

SEQ ID NO: 2904 - protein, 23 aa, Homo sapiens
RDETGNNSVQTVFQGTLAATKRW

SEQ ID NO: 2905 - protein, 29 aa, Homo sapiens
KQILGQLDGGSVAVLPVVDSTNQYLLDRI

SEQ ID NO: 2906 - protein, 31 aa, Homo sapiens; identical to SEQ ID NO: 27

SEQ ID NO: 2907 - protein, 22 aa, Homo sapiens
RNNWEKEIAAVISPELEHLDKT

SEQ ID NO: 2908 - protein, 29 aa, Homo sapiens
RGIDKQGALLLEQDGVIKPWMGGEISLRS

SEQ ID NO: 2909 - protein, 14 aa, Homo sapiens
RSSLTLATAINQRG

SEQ ID NO: 2910 - protein, 14 aa, Homo sapiens
RDGFHLVKDKADRT

SEQ ID NO: 2911 - protein, 29 aa, Homo sapiens
RGIDKQGALLLEQDGVIKPWMGGEISLRS

SEQ ID NO: 2912 - protein, 56 aa, Homo sapiens; identical to SEQ ID NO: 22

SEQ ID NO: 2913 - protein, 18 aa, Homo sapiens
RATHYHLSSQVQEMAGKI

SEQ ID NO: 2914 - protein, 23 aa, Homo sapiens
RQRHNSFADFLQAHLHTADLERH

SEQ ID NO: 2915 - protein, 52 aa, Homo sapiens; identical to SEQ ID NO: 1474

SEQ ID NO: 2916 - protein, 29 aa, Homo sapiens
RGIDKQGALLLEQDGVIKPWMGGEISLRS

SEQ ID NO: 2917 - protein, 17 aa, Homo sapiens
KVGFVGISNWALDPAKM

SEQ ID NO: 2918 - protein, 29 aa, Homo sapiens
RGIDKQGALLLEQDGVIKPWMGGEISLRS

SEQ ID NO: 2919 - protein, 29 aa, Homo sapiens
RGIDKQGALLLEQDGVIKPWMGGEISLRS

SEQ ID NO: 2920 - protein, 28 aa, Homo sapiens
KNLAFSPATMAHAFLPTMPEDLLAQARR

SEQ ID NO: 2921 - protein, 29 aa, Homo sapiens
KQILGQLDGGSVAVLPVVDSTNQYLLDRI

SEQ ID NO: 2922 - protein, 18 aa, Homo sapiens
RATHYHLSSQVQEMAGKI

SEQ ID NO: 2923 - protein, 48 aa, Homo sapiens; identical to SEQ ID NO: 18

SEQ ID NO: 2924 - protein, 29 aa, Homo sapiens
KESLGLNGDFSVLNTLLNFTDNFDDFRRE

SEQ ID NO: 2925 - protein, 34 aa, Homo sapiens; identical to SEQ ID NO: 40

SEQ ID NO: 2926 - protein, 29 aa, Homo sapiens
RGIDKQGALLLEQDGVIKPWMGGEISLRS

SEQ ID NO: 2927 - protein, 38 aa, Homo sapiens; identical to SEQ ID NO: 169

SEQ ID NO: 2928 - protein, 26 aa, Homo sapiens
KIKDYLEELWVQAQYITDAEGLPKKF

SEQ ID NO: 2929 - protein, 29 aa, Homo sapiens
RGIDKQGALLLEQDGVIKPWMGGEISLRS

SEQ ID NO: 2930 - protein, 33 aa, Homo sapiens; identical to SEQ ID NO: 152

SEQ ID NO: 2931 - protein, 17 aa, Homo sapiens
KIIYGDPVTFLPHLPRK

SEQ ID NO: 2932 - protein, 48 aa, Homo sapiens; identical to SEQ ID NO: 18

SEQ ID NO: 2933 - protein, 35 aa, Homo sapiens; identical to SEQ ID NO: 600

SEQ ID NO: 2934 - protein, 62 aa, Homo sapiens; identical to SEQ ID NO: 1391

SEQ ID NO: 2935 - protein, 18 aa, Homo sapiens
RATHYHLSSQVQEMAGKI

SEQ ID NO: 2936 - protein, 44 aa, Homo sapiens; identical to SEQ ID NO: 34

SEQ ID NO: 2937 - protein, 38 aa, Homo sapiens; identical to SEQ ID NO: 169

SEQ ID NO: 2938 - protein, 26 aa, Homo sapiens
RKLKAASEAPEEEVSLPWVHLAYQRF

SEQ ID NO: 2939 - protein, 38 aa, Homo sapiens; identical to SEQ ID NO: 169

SEQ ID NO: 2940 - protein, 29 aa, Homo sapiens
RGIDKQGALLLEQDGVIKPWMGGEISLRS

SEQ ID NO: 2941 - protein, 21 aa, Homo sapiens
RGLSQEGTGPPTSAGEGHSRT

SEQ ID NO: 2942 - protein, 33 aa, Homo sapiens; identical to SEQ ID NO: 152

SEQ ID NO: 2943 - protein, 52 aa, Homo sapiens; identical to SEQ ID NO: 1474

SEQ ID NO: 2944 - protein, 16 aa, Homo sapiens
KTKDEMAAAEEKVGKN

SEQ ID NO: 2945 - protein, 23 aa, Homo sapiens
RLSAYSLGGFAAEWLSQEYFHRQ

SEQ ID NO: 2946 - protein, 56 aa, Homo sapiens; identical to SEQ ID NO: 22

SEQ ID NO: 2947 - protein, 29 aa, Homo sapiens
RGIDKQGALLLEQDGVIKPWMGGEISLRS

SEQ ID NO: 2948 - protein, 26 aa, Homo sapiens
KVFVTPQAPLEAIQAYLAGHYRVPKQ

SEQ ID NO: 2949 - protein, 29 aa, Homo sapiens
RGIDKQGALLLEQDGVIKPWMGGEISLRS

SEQ ID NO: 2950 - protein, 23 aa, Homo sapiens
RLLLDEITRAQDLFLDGVPLRKT

SEQ ID NO: 2951 - protein, 15 aa, Homo sapiens
KVHGGTTADMIYSRV

SEQ ID NO: 2952 - protein, 29 aa, Homo sapiens
RGIDKQGALLLEQDGVIKPWMGGEISLRS

SEQ ID NO: 2953 - protein, 25 aa, Homo sapiens
RAPKPTLLWLQQFDTEYSFLKEVRN

SEQ ID NO: 2954 - protein, 28 aa, Homo sapiens
KDLQQYVSVVVLDEVGLAEDSPKMPLKT

SEQ ID NO: 2955 - protein, 18 aa, Homo sapiens
RATHYHLSSQVQEMAGKI

SEQ ID NO: 2956 - protein, 21 aa, Homo sapiens
KSGEVTLAEIDVIFKDFVNKY

SEQ ID NO: 2957 - protein, 29 aa, Homo sapiens
RGIDKQGALLLEQDGVIKPWMGGEISLRS

SEQ ID NO: 2958 - protein, 34 aa, Homo sapiens; identical to SEQ ID NO: 193

SEQ ID NO: 2959 - protein, 45 aa, Homo sapiens; identical to SEQ ID NO: 178

SEQ ID NO: 2960 - protein, 34 aa, Homo sapiens; identical to SEQ ID NO: 67

SEQ ID NO: 2961 - protein, 19 aa, Homo sapiens
KETSELGGSDVSILDTTRL

SEQ ID NO: 2962 - protein, 29 aa, Homo sapiens
RGIDKQGALLLEQDGVIKPWMGGEISLRS

SEQ ID NO: 2963 - protein, 34 aa, Homo sapiens; identical to SEQ ID NO: 857

SEQ ID NO: 2964 - protein, 34 aa, Homo sapiens; identical to SEQ ID NO: 193

SEQ ID NO: 2965 - protein, 56 aa, Homo sapiens; identical to SEQ ID NO: 22

SEQ ID NO: 2966 - protein, 21 aa, Homo sapiens
KHTIALWQFLSAHKSEQLLRL

SEQ ID NO: 2967 - protein, 29 aa, Homo sapiens
RGIDKQGALLLEQDGVIKPWMGGEISLRS

SEQ ID NO: 2968 - protein, 15 aa, Homo sapiens
RITVEYLQHIVEQKN

SEQ ID NO: 2969 - protein, 33 aa, Homo sapiens; identical to SEQ ID NO: 19

SEQ ID NO: 2970 - protein, 23 aa, Homo sapiens
KAASEAPEEEVSLPWVHLAYQRF

SEQ ID NO: 2971 - protein, 25 aa, Homo sapiens
RLQHVTISQLFAPGDLPELGLEHRA

SEQ ID NO: 2972 - protein, 19 aa, Homo sapiens
KETSELGGSDVSILDTTRL

SEQ ID NO: 2973 - protein, 38 aa, Homo sapiens; identical to SEQ ID NO: 169

SEQ ID NO: 2974 - protein, 30 aa, Homo sapiens; identical to SEQ ID NO: 940

SEQ ID NO: 2975 - protein, 33 aa, Homo sapiens; identical to SEQ ID NO: 152

SEQ ID NO: 2976 - protein, 29 aa, Homo sapiens
KQILGQLDGGSVAVLPVVDSTNQYLLDRI

SEQ ID NO: 2977 - protein, 33 aa, Homo sapiens; identical to SEQ ID NO: 19

SEQ ID NO: 2978 - protein, 29 aa, Homo sapiens
RGIDKQGALLLEQDGVIKPWMGGEISLRS

SEQ ID NO: 2979 - protein, 22 aa, Homo sapiens
RVMEELPLMLLSEFSLVDKLRI

SEQ ID NO: 2980 - protein, 29 aa, Homo sapiens
KQILGQLDGGSVAVLPVVDSTNQYLLDRI

SEQ ID NO: 2981 - protein, 23 aa, Homo sapiens
RRVMEELPLMLLSEFSLVDKLRI

SEQ ID NO: 2982 - protein, 20 aa, Homo sapiens
KTSAYSRNDELNHLEEEGRF

SEQ ID NO: 2983 - protein, 29 aa, Homo sapiens
RGIDKQGALLLEQDGVIKPWMGGEISLRS

SEQ ID NO: 2984 - protein, 28 aa, Homo sapiens
RDWGVDVFTVPGKGYSLPEPIPLLNAKQ

SEQ ID NO: 2985 - protein, 23 aa, Homo sapiens
KVFVTPQAPLEAIQAYLAGHYRV

SEQ ID NO: 2986 - protein, 23 aa, Homo sapiens
RLSAYSLGGFAAEWLSQEYFHRQ

SEQ ID NO: 2987 - protein, 56 aa, Homo sapiens; identical to SEQ ID NO: 22

SEQ ID NO: 2988 - protein, 62 aa, Homo sapiens; identical to SEQ ID NO: 1391

SEQ ID NO: 2989 - protein, 29 aa, Homo sapiens
RGIDKQGALLLEQDGVIKPWMGGEISLRS

SEQ ID NO: 2990 - protein, 23 aa, Homo sapiens
RATHYHLSSQVQEMAGKIDLLRD

SEQ ID NO: 2991 - protein, 22 aa, Homo sapiens
RVMEELPLMLLSEFSLVDKLRI

SEQ ID NO: 2992 - protein, 29 aa, Homo sapiens
KQILGQLDGGSVAVLPVVDSTNQYLLDRI

SEQ ID NO: 2993 - protein, 31 aa, Homo sapiens; identical to SEQ ID NO: 957

SEQ ID NO: 2994 - protein, 34 aa, Homo sapiens; identical to SEQ ID NO: 67

SEQ ID NO: 2995 - protein, 56 aa, Homo sapiens; identical to SEQ ID NO: 22

SEQ ID NO: 2996 - protein, 22 aa, Homo sapiens
RAALELFEQEGLAPYLPRWEKL

SEQ ID NO: 2997 - protein, 26 aa, Homo sapiens
KVFVTPQAPLEAIQAYLAGHYRVPKQ

SEQ ID NO: 2998 - protein, 34 aa, Homo sapiens; identical to SEQ ID NO: 857

SEQ ID NO: 2999 - protein, 34 aa, Homo sapiens; identical to SEQ ID NO: 67

SEQ ID NO: 3000 - protein, 42 aa, Homo sapiens; identical to SEQ ID NO: 57

SEQ ID NO: 3001 - protein, 56 aa, Homo sapiens; identical to SEQ ID NO: 22

SEQ ID NO: 3002 - protein, 23 aa, Homo sapiens
KQNIFGPSQKVPGGEQEDAESRY

SEQ ID NO: 3003 - protein, 38 aa, Homo sapiens; identical to SEQ ID NO: 169

SEQ ID NO: 3004 - protein, 23 aa, Homo sapiens
RATHYHLSSQVQEMAGKIDLLRD

SEQ ID NO: 3005 - protein, 33 aa, Homo sapiens; identical to SEQ ID NO: 152

SEQ ID NO: 3006 - protein, 44 aa, Homo sapiens; identical to SEQ ID NO: 34

SEQ ID NO: 3007 - protein, 29 aa, Homo sapiens
RGIDKQGALLLEQDGVIKPWMGGEISLRS

SEQ ID NO: 3008 - protein, 45 aa, Homo sapiens; identical to SEQ ID NO: 178

SEQ ID NO: 3009 - protein, 33 aa, Homo sapiens; identical to SEQ ID NO: 28

SEQ ID NO: 3010 - protein, 62 aa, Homo sapiens; identical to SEQ ID NO: 1391

SEQ ID NO: 3011 - protein, 22 aa, Homo sapiens
RVMEELPLMLLSEFSLVDKLRI

SEQ ID NO: 3012 - protein, 30 aa, Homo sapiens; identical to SEQ ID NO: 1299

SEQ ID NO: 3013 - protein, 42 aa, Homo sapiens; identical to SEQ ID NO: 57

SEQ ID NO: 3014 - protein, 45 aa, Homo sapiens; identical to SEQ ID NO: 178

SEQ ID NO: 3015 - protein, 38 aa, Homo sapiens; identical to SEQ ID NO: 169

SEQ ID NO: 3016 - protein, 56 aa, Homo sapiens; identical to SEQ ID NO: 22

SEQ ID NO: 3017 - protein, 31 aa, Homo sapiens; identical to SEQ ID NO: 27

SEQ ID NO: 3018 - protein, 21 aa, Homo sapiens
RGLSQEGTGPPTSAGEGHSRT

SEQ ID NO: 3019 - protein, 33 aa, Homo sapiens; identical to SEQ ID NO: 28

SEQ ID NO: 3020 - protein, 56 aa, Homo sapiens; identical to SEQ ID NO: 22

SEQ ID NO: 3021 - protein, 26 aa, Homo sapiens
KVFVTPQAPLEAIQAYLAGHYRVPKQ

SEQ ID NO: 3022 - protein, 14 aa, Homo sapiens
RNDELNHLEEEGRF

SEQ ID NO: 3023 - protein, 29 aa, Homo sapiens
KQILGQLDGGSVAVLPVVDSTNQYLLDRI

SEQ ID NO: 3024 - protein, 33 aa, Homo sapiens; identical to SEQ ID NO: 19

SEQ ID NO: 3025 - protein, 42 aa, Homo sapiens; identical to SEQ ID NO: 57

SEQ ID NO: 3026 - protein, 23 aa, Homo sapiens
KAASEAPEEEVSLPWVHLAYQRF

SEQ ID NO: 3027 - protein, 33 aa, Homo sapiens; identical to SEQ ID NO: 152

SEQ ID NO: 3028 - protein, 34 aa, Homo sapiens; identical to SEQ ID NO: 857

SEQ ID NO: 3029 - protein, 34 aa, Homo sapiens; identical to SEQ ID NO: 67

SEQ ID NO: 3030 - protein, 42 aa, Homo sapiens; identical to SEQ ID NO: 57

SEQ ID NO: 3031 - protein, 33 aa, Homo sapiens; identical to SEQ ID NO: 19

SEQ ID NO: 3032 - protein, 34 aa, Homo sapiens; identical to SEQ ID NO: 193

SEQ ID NO: 3033 - protein, 21 aa, Homo sapiens
RGLSQEGTGPPTSAGEGHSRT

SEQ ID NO: 3034 - protein, 34 aa, Homo sapiens; identical to SEQ ID NO: 857

SEQ ID NO: 3035 - protein, 33 aa, Homo sapiens; identical to SEQ ID NO: 19

SEQ ID NO: 3036 - protein, 26 aa, Homo sapiens
KVFVTPQAPLEAIQAYLAGHYRVPKQ

SEQ ID NO: 3037 - protein, 20 aa, Homo sapiens
KMLGHSADETIGVVHLVLRR

SEQ ID NO: 3038 - protein, 23 aa, Homo sapiens
KQNIFGPSQKVPGGEQEDAESRY

SEQ ID NO: 3039 - protein, 29 aa, Homo sapiens
RGIDKQGALLLEQDGVIKPWMGGEISLRS

SEQ ID NO: 3040 - protein, 56 aa, Homo sapiens; identical to SEQ ID NO: 22

SEQ ID NO: 3041 - protein, 28 aa, Homo sapiens
KNLAFSPATMAHAFLPTMPEDLLAQARR

SEQ ID NO: 3042 - protein, 24 aa, Homo sapiens
RDLYQGLLLQRVPFNVDFDKLPRH

SEQ ID NO: 3043 - protein, 34 aa, Homo sapiens; identical to SEQ ID NO: 67

SEQ ID NO: 3044 - protein, 62 aa, Homo sapiens; identical to SEQ ID NO: 1391

SEQ ID NO: 3045 - protein, 29 aa, Homo sapiens
RGIDKQGALLLEQDGVIKPWMGGEISLRS

SEQ ID NO: 3046 - protein, 34 aa, Homo sapiens; identical to SEQ ID NO: 857

SEQ ID NO: 3047 - protein, 45 aa, Homo sapiens; identical to SEQ ID NO: 178

SEQ ID NO: 3048 - protein, 28 aa, Homo sapiens
RDWGVDVFTVPGKGYSLPEPIPLLNAKQ

SEQ ID NO: 3049 - protein, 42 aa, Homo sapiens; identical to SEQ ID NO: 57

SEQ ID NO: 3050 - protein, 27 aa, Homo sapiens
KLLSTFLNQTGLDAFLLELHEMIILKL

SEQ ID NO: 3051 - protein, 23 aa, Homo sapiens
KQNIFGPSQKVPGGEQEDAESRY

SEQ ID NO: 3052 - protein, 34 aa, Homo sapiens; identical to SEQ ID NO: 67

SEQ ID NO: 3053 - protein, 45 aa, Homo sapiens; identical to SEQ ID NO: 178

SEQ ID NO: 3054 - protein, 34 aa, Homo sapiens; identical to SEQ ID NO: 67

SEQ ID NO: 3055 - protein, 29 aa, Homo sapiens
RGIDKQGALLLEQDGVIKPWMGGEISLRS

SEQ ID NO: 3056 - protein, 23 aa, Homo sapiens
RLSAYSLGGFAAEWLSQEYFHRQ

SEQ ID NO: 3057 - protein, 34 aa, Homo sapiens; identical to SEQ ID NO: 67

SEQ ID NO: 3058 - protein, 45 aa, Homo sapiens; identical to SEQ ID NO: 178

SEQ ID NO: 3059 - protein, 44 aa, Homo sapiens; identical to SEQ ID NO: 34

SEQ ID NO: 3060 - protein, 42 aa, Homo sapiens; identical to SEQ ID NO: 57

SEQ ID NO: 3061 - protein, 34 aa, Homo sapiens; identical to SEQ ID NO: 67

SEQ ID NO: 3062 - protein, 34 aa, Homo sapiens; identical to SEQ ID NO: 67

SEQ ID NO: 3063 - protein, 56 aa, Homo sapiens; identical to SEQ ID NO: 22

SEQ ID NO: 3064 - protein, 45 aa, Homo sapiens; identical to SEQ ID NO: 178

SEQ ID NO: 3065 - protein, 48 aa, Homo sapiens; identical to SEQ ID NO: 18
  SITE 38: note = Phosphorylated residue

SEQ ID NO: 3066 - protein, 48 aa, Homo sapiens; identical to SEQ ID NO: 18
  SITE 38: note = Phosphorylated residue

SEQ ID NO: 3067 - protein, 40 aa, Homo sapiens
  SITE 26: note = Phosphorylated residue
  SITE 31: note = Phosphorylated residue
RVLGALLPFLDAQYQKVPVLFHLDVTSSVQTGIWVFLFKL

SEQ ID NO: 3068 - protein, 33 aa, Homo sapiens; identical to SEQ ID NO: 19
  SITE 4: note = Phosphorylated residue

SEQ ID NO: 3069 - protein, 33 aa, Homo sapiens; identical to SEQ ID NO: 19
  SITE 4: note = Phosphorylated residue

SEQ ID NO: 3070 - protein, 30 aa, Homo sapiens
  SITE 8: note = Phosphorylated residue
  SITE 9: note = Phosphorylated residue
REQMLDTSSLLQFMREKQHLLSIDEPLFRS

SEQ ID NO: 3071 - protein, 36 aa, Homo sapiens
  SITE 22: note = Phosphorylated residue
KGGQKISPDTVLHLILPESPGSHEESREYSLEEVKE

SEQ ID NO: 3072 - protein, 56 aa, Homo sapiens; identical to SEQ ID NO: 22
  SITE 15: note = Phosphorylated residue

SEQ ID NO: 3073 - protein, 56 aa, Homo sapiens; identical to SEQ ID NO: 22
  SITE 32: note = Phosphorylated residue

SEQ ID NO: 3074 - protein, 35 aa, Homo sapiens; identical to SEQ ID NO: 600
  SITE 19: note = Phosphorylated residue

SEQ ID NO: 3075 - protein, 48 aa, Homo sapiens; identical to SEQ ID NO: 18
  SITE 21: note = Phosphorylated residue

SEQ ID NO: 3076 - protein, 30 aa, Homo sapiens; identical to SEQ ID NO: 1299
  SITE 21: note = Phosphorylated residue

SEQ ID NO: 3077 - protein, 48 aa, Homo sapiens; identical to SEQ ID NO: 18
  SITE 27: note = Phosphorylated residue

SEQ ID NO: 3078 - protein, 36 aa, Homo sapiens
  SITE 24: note = Phosphorylated residue
  SITE 29: note = Phosphorylated residue
RVEESVVNQGWITLQEAGINLDRNTLAATLIRELRA

SEQ ID NO: 3079 - protein, 38 aa, Homo sapiens; identical to SEQ ID NO: 1522
  SITE 30: note = Phosphorylated residue
  SITE 33: note = Phosphorylated residue

SEQ ID NO: 3080 - protein, 44 aa, Homo sapiens
  SITE 4: note = Phosphorylated residue
  SITE 13: note = Phosphorylated residue
RDGNLELLTRPDTPPWARDLWMFIFSDTMLLNIPLVMNNERHKG

SEQ ID NO: 3081 - protein, 35 aa, Homo sapiens
  SITE 4: note = Phosphorylated residue
  SITE 17: note = Phosphorylated residue
  SITE 23: note = Phosphorylated residue
RPDTPPWARDLWMFIFSDTMLLNIPLVMNNERHKG

SEQ ID NO: 3082 - protein, 36 aa, Homo sapiens; identical to SEQ ID NO: 3078
  SITE 5: note = Phosphorylated residue
  SITE 8: note = Phosphorylated residue
  SITE 29: note = Phosphorylated residue

SEQ ID NO: 3083 - protein, 26 aa, Homo sapiens
  SITE 8: note = Phosphorylated residue
KLIALLANGEFHSGEQLGETLGMSRA

SEQ ID NO: 3084 - protein, 34 aa, Homo sapiens
  SITE 17: note = Phosphorylated residue
RLLSLVDSAGQRDETGNNSVQTVFQGTLAATKRW

SEQ ID NO: 3085 - protein, 38 aa, Homo sapiens; identical to SEQ ID NO: 169
  SITE 34: note = Phosphorylated residue

SEQ ID NO: 3086 - protein, 24 aa, Homo sapiens
  SITE 2: note = Phosphorylated residue
RNFSGKDDIQALDIFLANLPEAKC

SEQ ID NO: 3087 - protein, 20 aa, Homo sapiens
  SITE 8: note = Phosphorylated residue
KTSAYSRNDELNHLEEEGRF

SEQ ID NO: 3088 - protein, 26 aa, Homo sapiens
  SITE 8: note = Phosphorylated residue
KLIALLANGEFHSGEQLGETLGMSRA

SEQ ID NO: 3089 - protein, 37 aa, Homo sapiens; identical to SEQ ID NO: 408
  SITE 35: note = Phosphorylated residue

SEQ ID NO: 3090 - protein, 20 aa, Homo sapiens
  SITE 12: note = Phosphorylated residue
KTSAYSRNDELNHLEEEGRF

SEQ ID NO: 3091 - protein, 22 aa, Homo sapiens
  SITE 2: note = Phosphorylated residue
RNNWEKEIAAVISPELEHLDKT

SEQ ID NO: 3092 - protein, 24 aa, Homo sapiens
  SITE 2: note = Phosphorylated residue
RNFSGKDDIQALDIFLANLPEAKC

SEQ ID NO: 3093 - protein, 20 aa, Homo sapiens
  SITE 5: note = Phosphorylated residue
KVGKNEQGEPEDLKKPEGKN

SEQ ID NO: 3094 - protein, 15 aa, Homo sapiens
  SITE 5: note = Phosphorylated residue
RGSPNETELIESAKG

SEQ ID NO: 3095 - protein, 17 aa, Homo sapiens
  SITE 6: note = Phosphorylated residue
RNDELNHLEEEGRFLKA

SEQ ID NO: 3096 - protein, 17 aa, Homo sapiens
  SITE 2: note = Phosphorylated residue
RNDELNHLEEEGRFLKA

SEQ ID NO: 3097 - protein, 19 aa, Homo sapiens
  SITE 14: note = Phosphorylated residue
RLSQAFIDLHSAGNMLFRT

SEQ ID NO: 3098 - protein, 13 aa, Homo sapiens
  SITE 4: note = Phosphorylated residue
RLLNFDTELSTKE

SEQ ID NO: 3099 - protein, 17 aa, Homo sapiens
  SITE 2: note = Phosphorylated residue
RNDELNHLEEEGRFLKA

SEQ ID NO: 3100 - protein, 24 aa, Homo sapiens
  SITE 2: note = Phosphorylated residue
RNFSGKDDIQALDIFLANLPEAKC

SEQ ID NO: 3101 - protein, 16 aa, Homo sapiens
  SITE 9: note = Phosphorylated residue
RFATSLVDNSVPLLRA

SEQ ID NO: 3102 - protein, 34 aa, Homo sapiens; identical to SEQ ID NO: 40
  SITE 31: note = Phosphorylated residue

SEQ ID NO: 3103 - protein, 17 aa, Homo sapiens
  SITE 6: note = Phosphorylated residue
RNDELNHLEEEGRFLKA

SEQ ID NO: 3104 - protein, 17 aa, Homo sapiens
  SITE 6: note = Phosphorylated residue
RNDELNHLEEEGRFLKA

SEQ ID NO: 3105 - protein, 20 aa, Homo sapiens
  SITE 15: note = Phosphorylated residue
RITVEYLQHIVEQKNGKERV

SEQ ID NO: 3106 - protein, 45 aa, Homo sapiens; identical to SEQ ID NO: 178
  SITE 34: note = Phosphorylated residue

SEQ ID NO: 3107 - protein, 22 aa, Homo sapiens
  SITE 2: note = Phosphorylated residue
RNNWEKEIAAVISPELEHLDKT

SEQ ID NO: 3108 - protein, 14 aa, Homo sapiens
  SITE 5: note = Phosphorylated residue
RRLLNFDTELSTKE

SEQ ID NO: 3109 - protein, 14 aa, Homo sapiens
  SITE 6: note = Phosphorylated residue
RSLETNGEINLPKD

SEQ ID NO: 3110 - protein, 17 aa, Homo sapiens
  SITE 9: note = Phosphorylated residue
KVGFVGISNWALDPAKM

SEQ ID NO: 3111 - protein, 14 aa, Homo sapiens
  SITE 6: note = Phosphorylated residue
RNDELNHLEEEGRF

SEQ ID NO: 3112 - protein, 14 aa, Homo sapiens
  SITE 5: note = Phosphorylated residue
RGGTNADTIKLVKV

SEQ ID NO: 3113 - protein, 14 aa, Homo sapiens
  SITE 6: note = Phosphorylated residue
RNDELNHLEEEGRF

SEQ ID NO: 3114 - protein, 26 aa, Homo sapiens
  SITE 8: note = Phosphorylated residue
KLIALLANGEFHSGEQLGETLGMSRA

SEQ ID NO: 3115 - protein, 31 aa, Homo sapiens; identical to SEQ ID NO: 27
  SITE 22: note = Phosphorylated residue

SEQ ID NO: 3116 - protein, 16 aa, Homo sapiens
  SITE 9: note = Phosphorylated residue
RFATSLVDNSVPLLRA

SEQ ID NO: 3117 - protein, 22 aa, Homo sapiens
  SITE 2: note = Phosphorylated residue
RNNWEKEIAAVISPELEHLDKT

SEQ ID NO: 3118 - protein, 29 aa, Homo sapiens
  SITE 22: note = Phosphorylated residue
KQILGQLDGGSVAVLPVVDSTNQYLLDRI

SEQ ID NO: 3119 - protein, 22 aa, Homo sapiens
  SITE 2: note = Phosphorylated residue
RNNWEKEIAAVISPELEHLDKT

SEQ ID NO: 3120 - protein, 44 aa, Homo sapiens; identical to SEQ ID NO: 34
  SITE 29: note = Phosphorylated residue

SEQ ID NO: 3121 - protein, 29 aa, Homo sapiens
  SITE 22: note = Phosphorylated residue
KQILGQLDGGSVAVLPVVDSTNQYLLDRI

SEQ ID NO: 3122 - protein, 16 aa, Homo sapiens
  SITE 9: note = Phosphorylated residue
RFATSLVDNSVPLLRA

SEQ ID NO: 3123 - protein, 29 aa, Homo sapiens
  SITE 22: note = Phosphorylated residue
KQILGQLDGGSVAVLPVVDSTNQYLLDRI

SEQ ID NO: 3124 - protein, 29 aa, Homo sapiens
  SITE 22: note = Phosphorylated residue
KQILGQLDGGSVAVLPVVDSTNQYLLDRI

SEQ ID NO: 3125 - protein, 26 aa, Homo sapiens
  SITE 8: note = Phosphorylated residue
KLIALLANGEFHSGEQLGETLGMSRA

SEQ ID NO: 3126 - protein, 17 aa, Homo sapiens
  SITE 2: note = Phosphorylated residue
RNDELNHLEEEGRFLKA

SEQ ID NO: 3127 - protein, 34 aa, Homo sapiens; identical to SEQ ID NO: 67
  SITE 22: note = Phosphorylated residue

SEQ ID NO: 3128 - protein, 28 aa, Homo sapiens
  SITE 25: note = Phosphorylated residue
RDWGVDVFTVPGKGYSLPEPIPLLNAKQ

SEQ ID NO: 3129 - protein, 45 aa, Homo sapiens; identical to SEQ ID NO: 178
  SITE 34: note = Phosphorylated residue

SEQ ID NO: 3130 - protein, 28 aa, Homo sapiens
  SITE 25: note = Phosphorylated residue
RDWGVDVFTVPGKGYSLPEPIPLLNAKQ

SEQ ID NO: 3131 - protein, 34 aa, Homo sapiens; identical to SEQ ID NO: 67
  SITE 22: note = Phosphorylated residue

SEQ ID NO: 3132 - skipped

SEQ ID NO: 3133 - protein, 26 aa, Homo sapiens
  SITE 8: note = Phosphorylated residue
  SITE 23: note = Phosphorylated residue
KLIALLANGEFHSGEQLGETLGMSRA

SEQ ID NO: 3134 - protein, 20 aa, Homo sapiens
  SITE 17: note = Phosphorylated residue
KDVVKQQGLRQDHPGQMDRY

SEQ ID NO: 3135 - protein, 21 aa, Homo sapiens
  SITE 3: note = Phosphorylated residue
KHMVTMDGVREEDLAPFSLRK

SEQ ID NO: 3136 - protein, 15 aa, Homo sapiens
  SITE 10: note = Phosphorylated residue
KVHGGTTADMIYSRV

SEQ ID NO: 3137 - protein, 12 aa, Homo sapiens
  SITE 5: note = Phosphorylated residue
RSTLMVSDVTRL

SEQ ID NO: 3138 - protein, 20 aa, Homo sapiens
  SITE 8: note = Phosphorylated residue
RQDHPGQMDRYLVYGDEYKA

SEQ ID NO: 3139 - protein, 15 aa, Homo sapiens
  SITE 10: note = Phosphorylated residue
KVHGGTTADMIYSRV

SEQ ID NO: 3140 - protein, 20 aa, Homo sapiens
  SITE 16: note = Phosphorylated residue
RFRPQWSLRDTLVSYMQTKE

SEQ ID NO: 3141 - protein, 20 aa, Homo sapiens
  SITE 15: note = Phosphorylated residue
RAADFLSEPEGGPEMAKEKQ

SEQ ID NO: 3142 - protein, 17 aa, Homo sapiens
  SITE 3: note = Phosphorylated residue
KVMNHITDGPRKDLVKG

SEQ ID NO: 3143 - protein, 9 aa, Homo sapiens
  SITE 7: note = Phosphorylated residue
KILAIEMRF

SEQ ID NO: 3144 - protein, 16 aa, Homo sapiens
  SITE 13: note = Phosphorylated residue
KQQGLRQDHPGQMDRY

SEQ ID NO: 3145 - protein, 16 aa, Homo sapiens
  SITE 6: note = Phosphorylated residue
KTLPTMNNLISQDKRI

SEQ ID NO: 3146 - protein, 14 aa, Homo sapiens
  SITE 2: note = Phosphorylated residue
RMKQPPATTPPFKT

SEQ ID NO: 3147 - protein, 15 aa, Homo sapiens
  SITE 10: note = Phosphorylated residue
KVHGGTTADMIYSRV

SEQ ID NO: 3148 - protein, 16 aa, Homo sapiens
  SITE 14: note = Phosphorylated residue
RLLNFDTELSTKEMRN

SEQ ID NO: 3149 - protein, 14 aa, Homo sapiens
  SITE 2: note = Phosphorylated residue
RMKQPPATTPPFKT

SEQ ID NO: 3150 - protein, 10 aa, Homo sapiens
  SITE 4: note = Phosphorylated residue
RIIMEQSMRC

SEQ ID NO: 3151 - protein, 18 aa, Homo sapiens
  SITE 14: note = Phosphorylated residue
RILTIYPQVLHSLMEARW

SEQ ID NO: 3152 - protein, 29 aa, Homo sapiens
  SITE 21: note = Phosphorylated residue
RGIDKQGALLLEQDGVIKPWMGGEISLRS

SEQ ID NO: 3153 - protein, 10 aa, Homo sapiens
  SITE 4: note = Phosphorylated residue
RIIMEQSMRC

SEQ ID NO: 3154 - protein, 34 aa, Homo sapiens; identical to SEQ ID NO: 193
  SITE 32: note = Phosphorylated residue

SEQ ID NO: 3155 - protein, 23 aa, Homo sapiens
  SITE 10: note = Phosphorylated residue
RRVMEELPLMLLSEFSLVDKLRI

SEQ ID NO: 3156 - protein, 21 aa, Homo sapiens
  SITE 2: note = Phosphorylated residue
KMLGHSADETIGVVHLVLRRL

SEQ ID NO: 3157 - protein, 11 aa, Homo sapiens
  SITE 4: note = Phosphorylated residue
RVSMEETADRL

SEQ ID NO: 3158 - protein, 10 aa, Homo sapiens
  SITE 4: note = Phosphorylated residue
RIIMEQSMRC

SEQ ID NO: 3159 - protein, 14 aa, Homo sapiens
  SITE 2: note = Phosphorylated residue
RMKQPPATTPPFKT

SEQ ID NO: 3160 - protein, 13 aa, Homo sapiens
  SITE 6: note = Phosphorylated residue
RRSTLMVSDVTRL

SEQ ID NO: 3161 - protein, 29 aa, Homo sapiens
  SITE 21: note = Phosphorylated residue
RGIDKQGALLLEQDGVIKPWMGGEISLRS

SEQ ID NO: 3162 - protein, 23 aa, Homo sapiens
  SITE 3: note = Phosphorylated residue
RGMEFVQGLSKPGRPHQWVFPKD

SEQ ID NO: 3163 - protein, 15 aa, Homo sapiens
  SITE 10: note = Phosphorylated residue
KVHGGTTADMIYSRV

SEQ ID NO: 3164 - protein, 15 aa, Homo sapiens
  SITE 10: note = Phosphorylated residue
KVHGGTTADMIYSRV

SEQ ID NO: 3165 - protein, 15 aa, Homo sapiens
  SITE 10: note = Phosphorylated residue
KVHGGTTADMIYSRV

SEQ ID NO: 3166 - protein, 15 aa, Homo sapiens
  SITE 10: note = Phosphorylated residue
KVHGGTTADMIYSRV

SEQ ID NO: 3167 - protein, 15 aa, Homo sapiens
  SITE 10: note = Phosphorylated residue
KVHGGTTADMIYSRV

SEQ ID NO: 3168 - protein, 18 aa, Homo sapiens
  SITE 14: note = Phosphorylated residue
RILTIYPQVLHSLMEARW

SEQ ID NO: 3169 - protein, 18 aa, Homo sapiens
  SITE 14: note = Phosphorylated residue
RATHYHLSSQVQEMAGKI

SEQ ID NO: 3170 - protein, 25 aa, Homo sapiens
  SITE 13: note = Phosphorylated residue
KQQGLRQDHPGQMDRYLVYGDEYKA

SEQ ID NO: 3171 - protein, 18 aa, Homo sapiens
  SITE 14: note = Phosphorylated residue
RATHYHLSSQVQEMAGKI

SEQ ID NO: 3172 - protein, 18 aa, Homo sapiens
  SITE 14: note = Phosphorylated residue
RILTIYPQVLHSLMEARW

SEQ ID NO: 3173 - protein, 23 aa, Homo sapiens
  SITE 3: note = Phosphorylated residue
RGMEFVQGLSKPGRPHQWVFPKD

SEQ ID NO: 3174 - protein, 14 aa, Homo sapiens
  SITE 2: note = Phosphorylated residue
RMKQPPATTPPFKT

SEQ ID NO: 3175 - protein, 15 aa, Homo sapiens
  SITE 11: note = Phosphorylated residue
RHDWNYEHLFMDIKN

SEQ ID NO: 3176 - protein, 15 aa, Homo sapiens
  SITE 10: note = Phosphorylated residue
KVHGGTTADMIYSRV

SEQ ID NO: 3177 - protein, 22 aa, Homo sapiens
  SITE 3: note = Phosphorylated residue
RVMEELPLMLLSEFSLVDKLRI

SEQ ID NO: 3178 - protein, 16 aa, Homo sapiens
  SITE 6: note = Phosphorylated residue
KTLPTMNNLISQDKRI

SEQ ID NO: 3179 - protein, 46 aa, Homo sapiens; identical to SEQ ID NO: 1885
  SITE 21: note = Phosphorylated residue

SEQ ID NO: 3180 - protein, 16 aa, Homo sapiens
  SITE 4: note = Phosphorylated residue
REQMLDTSSLLQFMRE

SEQ ID NO: 3181 - protein, 23 aa, Homo sapiens
  SITE 10: note = Phosphorylated residue
RRVMEELPLMLLSEFSLVDKLRI

SEQ ID NO: 3182 - protein, 15 aa, Homo sapiens
  SITE 10: note = Phosphorylated residue
KVHGGTTADMIYSRV

SEQ ID NO: 3183 - protein, 12 aa, Homo sapiens
  SITE 5: note = Phosphorylated residue
RSTLMVSDVTRL

SEQ ID NO: 3184 - protein, 20 aa, Homo sapiens
  SITE 9: note = Phosphorylated residue
RVMEELPLMLLSEFSLVDKL

SEQ ID NO: 3185 - protein, 31 aa, Homo sapiens; identical to SEQ ID NO: 27
  SITE 21: note = Phosphorylated residue

SEQ ID NO: 3186 - protein, 12 aa, Homo sapiens
  SITE 5: note = Phosphorylated residue
RSTLMVSDVTRL

SEQ ID NO: 3187 - protein, 20 aa, Homo sapiens
  SITE 3: note = Phosphorylated residue
RVMEELPLMLLSEFSLVDKL

SEQ ID NO: 3188 - protein, 21 aa, Homo sapiens
  SITE 10: note = Phosphorylated residue
RRVMEELPLMLLSEFSLVDKL

SEQ ID NO: 3189 - protein, 18 aa, Homo sapiens
  SITE 14: note = Phosphorylated residue
RATHYHLSSQVQEMAGKI

SEQ ID NO: 3190 - protein, 12 aa, Homo sapiens
  SITE 5: note = Phosphorylated residue
RSTLMVSDVTRL

SEQ ID NO: 3191 - protein, 29 aa, Homo sapiens
  SITE 21: note = Phosphorylated residue
RGIDKQGALLLEQDGVIKPWMGGEISLRS

SEQ ID NO: 3192 - protein, 18 aa, Homo sapiens
  SITE 14: note = Phosphorylated residue
RATHYHLSSQVQEMAGKI

SEQ ID NO: 3193 - protein, 25 aa, Homo sapiens
  SITE 19: note = Phosphorylated residue
KSSLLGSGDWHQYYDIVYMKPHGRL

SEQ ID NO: 3194 - protein, 33 aa, Homo sapiens; identical to SEQ ID NO: 152
  SITE 29: note = Phosphorylated residue

SEQ ID NO: 3195 - protein, 15 aa, Homo sapiens
  SITE 10: note = Phosphorylated residue
KVHGGTTADMIYSRV

SEQ ID NO: 3196 - protein, 18 aa, Homo sapiens
  SITE 4: note = Phosphorylated residue
RVSMEETADRLGSIPLRQ

SEQ ID NO: 3197 - protein, 20 aa, Homo sapiens
  SITE 15: note = Phosphorylated residue
RAADFLSEPEGGPEMAKEKQ

SEQ ID NO: 3198 - protein, 59 aa, Homo sapiens; identical to SEQ ID NO: 88
  SITE 51: note = Phosphorylated residue

SEQ ID NO: 3199 - protein, 16 aa, Homo sapiens
  SITE 6: note = Phosphorylated residue
KTLPTMNNLISQDKRI

SEQ ID NO: 3200 - protein, 20 aa, Homo sapiens
  SITE 8: note = Phosphorylated residue
KTIVADAMQGPAAYSDLFRS

SEQ ID NO: 3201 - protein, 18 aa, Homo sapiens
  SITE 4: note = Phosphorylated residue
RVSMEETADRLGSIPLRQ

SEQ ID NO: 3202 - protein, 21 aa, Homo sapiens
  SITE 6: note = Phosphorylated residue
KHMVTMDGVREEDLAPFSLRK

SEQ ID NO: 3203 - protein, 12 aa, Homo sapiens
  SITE 8: note = Phosphorylated residue
RDTLVSYMQTKE

SEQ ID NO: 3204 - protein, 16 aa, Homo sapiens
  SITE 14: note = Phosphorylated residue
RLLNFDTELSTKEMRN

SEQ ID NO: 3205 - protein, 15 aa, Homo sapiens
  SITE 10: note = Phosphorylated residue
KVHGGTTADMIYSRV

SEQ ID NO: 3206 - protein, 29 aa, Homo sapiens
  SITE 21: note = Phosphorylated residue
RGIDKQGALLLEQDGVIKPWMGGEISLRS

SEQ ID NO: 3207 - protein, 22 aa, Homo sapiens
  SITE 3: note = Phosphorylated residue
RVMEELPLMLLSEFSLVDKLRI

SEQ ID NO: 3208 - protein, 28 aa, Homo sapiens
  SITE 18: note = Phosphorylated residue
KNLAFSPATMAHAFLPTMPEDLLAQARR

SEQ ID NO: 3209 - protein, 17 aa, Homo sapiens
  SITE 11: note = Phosphorylated residue
RHDWNYEHLFMDIKNKM

SEQ ID NO: 3210 - protein, 20 aa, Homo sapiens
  SITE 9: note = Phosphorylated residue
RVMEELPLMLLSEFSLVDKL

SEQ ID NO: 3211 - protein, 25 aa, Homo sapiens
  SITE 19: note = Phosphorylated residue
KSSLLGSGDWHQYYDIVYMKPHGRL

SEQ ID NO: 3212 - protein, 21 aa, Homo sapiens
  SITE 2: note = Phosphorylated residue
KMLGHSADETIGVVHLVLRRL

SEQ ID NO: 3213 - protein, 20 aa, Homo sapiens
  SITE 9: note = Phosphorylated residue
RVMEELPLMLLSEFSLVDKL

SEQ ID NO: 3214 - protein, 29 aa, Homo sapiens
  SITE 21: note = Phosphorylated residue
RGIDKQGALLLEQDGVIKPWMGGEISLRS

SEQ ID NO: 3215 - protein, 18 aa, Homo sapiens
  SITE 15: note = Phosphorylated residue
RAADFLSEPEGGPEMAKE

SEQ ID NO: 3216 - protein, 18 aa, Homo sapiens
  SITE 14: note = Phosphorylated residue
RATHYHLSSQVQEMAGKI

SEQ ID NO: 3217 - protein, 20 aa, Homo sapiens
  SITE 17: note = Phosphorylated residue
KVGFVGISNWALDPAKMNRG

SEQ ID NO: 3218 - protein, 23 aa, Homo sapiens
  SITE 3: note = Phosphorylated residue
RGMEFVQGLSKPGRPHQWVFPKD

SEQ ID NO: 3219 - protein, 20 aa, Homo sapiens
  SITE 17: note = Phosphorylated residue
KVGFVGISNWALDPAKMNRG

SEQ ID NO: 3220 - protein, 34 aa, Homo sapiens; identical to SEQ ID NO: 193
  SITE 22: note = Phosphorylated residue

SEQ ID NO: 3221 - protein, 20 aa, Homo sapiens
  SITE 15: note = Phosphorylated residue
RAADFLSEPEGGPEMAKEKQ

SEQ ID NO: 3222 - protein, 28 aa, Homo sapiens
  SITE 24: note = Phosphorylated residue
KDLQQYVSVVVLDEVGLAEDSPKMPLKT

SEQ ID NO: 3223 - protein, 21 aa, Homo sapiens
  SITE 2: note = Phosphorylated residue
KMLGHSADETIGVVHLVLRRL

SEQ ID NO: 3224 - protein, 22 aa, Homo sapiens
  SITE 9: note = Phosphorylated residue
RVMEELPLMLLSEFSLVDKLRI

SEQ ID NO: 3225 - protein, 29 aa, Homo sapiens
  SITE 21: note = Phosphorylated residue
RGIDKQGALLLEQDGVIKPWMGGEISLRS

SEQ ID NO: 3226 - protein, 33 aa, Homo sapiens; identical to SEQ ID NO: 152
  SITE 29: note = Phosphorylated residue

SEQ ID NO: 3227 - protein, 29 aa, Homo sapiens
  SITE 21: note = Phosphorylated residue
RGIDKQGALLLEQDGVIKPWMGGEISLRS

SEQ ID NO: 3228 - protein, 25 aa, Homo sapiens
  SITE 17: note = Phosphorylated residue
KQGALLLEQDGVIKPWMGGEISLRS

SEQ ID NO: 3229 - protein, 29 aa, Homo sapiens
  SITE 21: note = Phosphorylated residue
RGIDKQGALLLEQDGVIKPWMGGEISLRS

SEQ ID NO: 3230 - protein, 29 aa, Homo sapiens
  SITE 21: note = Phosphorylated residue
RGIDKQGALLLEQDGVIKPWMGGEISLRS

SEQ ID NO: 3231 - protein, 38 aa, Homo sapiens; identical to SEQ ID NO: 169
  SITE 24: note = Phosphorylated residue

SEQ ID NO: 3232 - protein, 21 aa, Homo sapiens
  SITE 2: note = Phosphorylated residue
KMLGHSADETIGVVHLVLRRL

SEQ ID NO: 3233 - protein, 23 aa, Homo sapiens
  SITE 10: note = Phosphorylated residue
RRVMEELPLMLLSEFSLVDKLRI

SEQ ID NO: 3234 - protein, 23 aa, Homo sapiens
  SITE 10: note = Phosphorylated residue
RRVMEELPLMLLSEFSLVDKLRI

SEQ ID NO: 3235 - protein, 15 aa, Homo sapiens
  SITE 10: note = Phosphorylated residue
KVHGGTTADMIYSRV

SEQ ID NO: 3236 - protein, 33 aa, Homo sapiens; identical to SEQ ID NO: 19
  SITE 30: note = Phosphorylated residue

SEQ ID NO: 3237 - protein, 18 aa, Homo sapiens
  SITE 14: note = Phosphorylated residue
RATHYHLSSQVQEMAGKI

SEQ ID NO: 3238 - protein, 18 aa, Homo sapiens
  SITE 14: note = Phosphorylated residue
RATHYHLSSQVQEMAGKI

SEQ ID NO: 3239 - protein, 22 aa, Homo sapiens
  SITE 3: note = Phosphorylated residue
RVMEELPLMLLSEFSLVDKLRI

SEQ ID NO: 3240 - protein, 33 aa, Homo sapiens; identical to SEQ ID NO: 152
  SITE 29: note = Phosphorylated residue

SEQ ID NO: 3241 - protein, 22 aa, Homo sapiens
  SITE 9: note = Phosphorylated residue
RVMEELPLMLLSEFSLVDKLRI

SEQ ID NO: 3242 - protein, 38 aa, Homo sapiens; identical to SEQ ID NO: 169
  SITE 24: note = Phosphorylated residue

SEQ ID NO: 3243 - protein, 29 aa, Homo sapiens
  SITE 21: note = Phosphorylated residue
RGIDKQGALLLEQDGVIKPWMGGEISLRS

SEQ ID NO: 3244 - protein, 38 aa, Homo sapiens; identical to SEQ ID NO: 169
  SITE 24: note = Phosphorylated residue

SEQ ID NO: 3245 - protein, 28 aa, Homo sapiens
  SITE 10: note = Phosphorylated residue
KNLAFSPATMAHAFLPTMPEDLLAQARR

SEQ ID NO: 3246 - protein, 28 aa, Homo sapiens
  SITE 10: note = Phosphorylated residue
KNLAFSPATMAHAFLPTMPEDLLAQARR

SEQ ID NO: 3247 - protein, 25 aa, Homo sapiens
  SITE 17: note = Phosphorylated residue
KQGALLLEQDGVIKPWMGGEISLRS

SEQ ID NO: 3248 - protein, 38 aa, Homo sapiens; identical to SEQ ID NO: 169
  SITE 24: note = Phosphorylated residue

SEQ ID NO: 3249 - protein, 22 aa, Homo sapiens
  SITE 9: note = Phosphorylated residue
RVMEELPLMLLSEFSLVDKLRI

SEQ ID NO: 3250 - protein, 33 aa, Homo sapiens; identical to SEQ ID NO: 152
  SITE 29: note = Phosphorylated residue

SEQ ID NO: 3251 - protein, 28 aa, Homo sapiens
  SITE 18: note = Phosphorylated residue
KNLAFSPATMAHAFLPTMPEDLLAQARR

SEQ ID NO: 3252 - protein, 38 aa, Homo sapiens; identical to SEQ ID NO: 169
  SITE 24: note = Phosphorylated residue

SEQ ID NO: 3253 - protein, 29 aa, Homo sapiens
  SITE 21: note = Phosphorylated residue
RGIDKQGALLLEQDGVIKPWMGGEISLRS

SEQ ID NO: 3254 - protein, 22 aa, Homo sapiens
  SITE 3: note = Phosphorylated residue
RVMEELPLMLLSEFSLVDKLRI

SEQ ID NO: 3255 - protein, 22 aa, Homo sapiens
  SITE 9: note = Phosphorylated residue
RVMEELPLMLLSEFSLVDKLRI

SEQ ID NO: 3256 - protein, 29 aa, Homo sapiens
  SITE 21: note = Phosphorylated residue
RGIDKQGALLLEQDGVIKPWMGGEISLRS

SEQ ID NO: 3257 - protein, 38 aa, Homo sapiens; identical to SEQ ID NO: 169
  SITE 24: note = Phosphorylated residue

SEQ ID NO: 3258 - protein, 22 aa, Homo sapiens
  SITE 3: note = Phosphorylated residue
RVMEELPLMLLSEFSLVDKLRI

SEQ ID NO: 3259 - protein, 27 aa, Homo sapiens
  SITE 22: note = Phosphorylated residue
KLLSTFLNQTGLDAFLLELHEMIILKL

SEQ ID NO: 3260 - protein, 56 aa, Homo sapiens; identical to SEQ ID NO: 22
  SITE 10: note = Phosphorylated residue

SEQ ID NO: 3261 - protein, 27 aa, Homo sapiens
  SITE 22: note = Phosphorylated residue
KLLSTFLNQTGLDAFLLELHEMIILKL

SEQ ID NO: 3262 - protein, 29 aa, Homo sapiens
  SITE 21: note = Phosphorylated residue
RGIDKQGALLLEQDGVIKPWMGGEISLRS

SEQ ID NO: 3263 - protein, 27 aa, Homo sapiens
  SITE 22: note = Phosphorylated residue
KLLSTFLNQTGLDAFLLELHEMIILKL

SEQ ID NO: 3264 - protein, 23 aa, Homo sapiens
  SITE 9: note = Phosphorylated residue
  SITE 16: note = Phosphorylated residue
RMKQPPATTPPFKTHCQEAETKT

SEQ ID NO: 3265 - protein, 33 aa, Homo sapiens
  SITE 5: note = Phosphorylated residue
  SITE 18: note = Phosphorylated residue
  SITE 31: note = Phosphorylated residue
KAFITEDKTELYMLFINCLEDSILEKTSAYSRN

SEQ ID NO: 3266 - protein, 37 aa, Homo sapiens
  SITE 17: note = Phosphorylated residue
  SITE 19: note = Phosphorylated residue
RGSPNETELIESAKGICSSDILVQDRVQGYFASFAKA

SEQ ID NO: 3267 - protein, 77 aa, Homo sapiens; identical to SEQ ID NO: 204
  SITE 9: note = Phosphorylated residue
  SITE 26: note = Phosphorylated residue
  SITE 40: note = Phosphorylated residue

SEQ ID NO: 3268 - protein, 33 aa, Homo sapiens; identical to SEQ ID NO: 286
  SITE 10: note = Phosphorylated residue
  SITE 16: note = Phosphorylated residue
  SITE 24: note = Phosphorylated residue

SEQ ID NO: 3269 - protein, 60 aa, Homo sapiens; identical to SEQ ID NO: 202
  SITE 9: note = Phosphorylated residue
  SITE 13: note = Phosphorylated residue
  SITE 31: note = Phosphorylated residue
  SITE 37: note = Phosphorylated residue
  SITE 49: note = Phosphorylated residue

SEQ ID NO: 3270 - protein, 74 aa, Homo sapiens
  SITE 6: note = Phosphorylated residue
  SITE 26: note = Phosphorylated residue
  SITE 54: note = Phosphorylated residue
  SITE 72: note = Phosphorylated residue
KMAQDSLPSSVISAISGQLQSYSDACEVLSVVEVTLGFLSTAGGDPNMQLNVYTQDILQMGDQTIHVLKALNRC

SEQ ID NO: 3271 - protein, 33 aa, Homo sapiens; identical to SEQ ID NO: 286
  SITE 10: note = Phosphorylated residue
  SITE 16: note = Phosphorylated residue

SEQ ID NO: 3272 - protein, 33 aa, Homo sapiens; identical to SEQ ID NO: 286
  SITE 6: note = Phosphorylated residue
  SITE 16: note = Phosphorylated residue

SEQ ID NO: 3273 - skipped

SEQ ID NO: 3274 - protein, 32 aa, Homo sapiens
  SITE 2: note = Phosphorylated residue
  SITE 5: note = Phosphorylated residue
  SITE 11: note = Phosphorylated residue
  SITE 19: note = Phosphorylated residue
KNLSMPLELICSDEHMQGSGSLAQAVIREVRA

SEQ ID NO: 3275 - protein, 76 aa, Homo sapiens
  SITE 2: note = Phosphorylated residue
  SITE 4: note = Phosphorylated residue
  SITE 28: note = Phosphorylated residue
KNKMAQDSLPSSVISAISGQLQSYSDACEVLSVVEVTLGFLSTAGGDPNMQLNVYTQDILQMGDQTIHVLKALNRC

SEQ ID NO: 3276 - protein, 23 aa, Homo sapiens
  SITE 2: note = Phosphorylated residue
  SITE 16: note = Phosphorylated residue
RMKQPPATTPPFKTHCQEAETKT

SEQ ID NO: 3277 - protein, 40 aa, Homo sapiens; identical to SEQ ID NO: 1665
  SITE 16: note = Phosphorylated residue
  SITE 22: note = Phosphorylated residue

SEQ ID NO: 3278 - protein, 23 aa, Homo sapiens
  SITE 2: note = Phosphorylated residue
  SITE 16: note = Phosphorylated residue
RMKQPPATTPPFKTHCQEAETKT

SEQ ID NO: 3279 - protein, 13 aa, Homo sapiens
  SITE 3: note = Phosphorylated residue
  SITE 10: note = Phosphorylated residue
RSCVQSAVGMLRD

SEQ ID NO: 3280 - protein, 23 aa, Homo sapiens
  SITE 2: note = Phosphorylated residue
  SITE 16: note = Phosphorylated residue
RMKQPPATTPPFKTHCQEAETKT

SEQ ID NO: 3281 - protein, 23 aa, Homo sapiens
  SITE 2: note = Phosphorylated residue
  SITE 16: note = Phosphorylated residue
RMKQPPATTPPFKTHCQEAETKT

SEQ ID NO: 3282 - protein, 23 aa, Homo sapiens
  SITE 2: note = Phosphorylated residue
  SITE 16: note = Phosphorylated residue
RMKQPPATTPPFKTHCQEAETKT

SEQ ID NO: 3283 - protein, 14 aa, Homo sapiens
  SITE 2: note = Phosphorylated residue
  SITE 9: note = Phosphorylated residue
KCSEEVSPMQLIKQ

SEQ ID NO: 3284 - protein, 23 aa, Homo sapiens
  SITE 2: note = Phosphorylated residue
  SITE 16: note = Phosphorylated residue
RMKQPPATTPPFKTHCQEAETKT

SEQ ID NO: 3285 - protein, 13 aa, Homo sapiens
  SITE 3: note = Phosphorylated residue
  SITE 10: note = Phosphorylated residue
RSCVQSAVGMLRD

SEQ ID NO: 3286 - protein, 23 aa, Homo sapiens
  SITE 2: note = Phosphorylated residue
  SITE 16: note = Phosphorylated residue
RMKQPPATTPPFKTHCQEAETKT

SEQ ID NO: 3287 - protein, 23 aa, Homo sapiens
  SITE 2: note = Phosphorylated residue
  SITE 16: note = Phosphorylated residue
RMKQPPATTPPFKTHCQEAETKT

SEQ ID NO: 3288 - protein, 14 aa, Homo sapiens
  SITE 2: note = Phosphorylated residue
  SITE 9: note = Phosphorylated residue
KCSEEVSPMQLIKQ

SEQ ID NO: 3289 - protein, 22 aa, Homo sapiens
  SITE 4: note = Phosphorylated residue
  SITE 15: note = Phosphorylated residue
KTHCQEAETKTKDEMAAAEEKV

SEQ ID NO: 3290 - protein, 23 aa, Homo sapiens
  SITE 2: note = Phosphorylated residue
  SITE 16: note = Phosphorylated residue
RMKQPPATTPPFKTHCQEAETKT

SEQ ID NO: 3291 - protein, 43 aa, Homo sapiens
  SITE 6: note = Phosphorylated residue
  SITE 7: note = Phosphorylated residue
  SITE 13: note = Phosphorylated residue
  SITE 14: note = Phosphorylated residue
  SITE 18: note = Phosphorylated residue
  SITE 27: note = Phosphorylated residue
  SITE 30: note = Phosphorylated residue
RVHWYTCPNGHPCSVGECGRPMEQSICIDCHAPIGGIDHKPRD

SEQ ID NO: 3292 - protein, 71 aa, Homo sapiens
  SITE 8: note = Phosphorylated residue
  SITE 14: note = Phosphorylated residue
  SITE 36: note = Phosphorylated residue
  SITE 51: note = Phosphorylated residue
  SITE 59: note = Phosphorylated residue
  SITE 63: note = Phosphorylated residue
RSDTEPGMDLWEFCSETFQRPYQYLRRFNQNQDLDTFQYQEGSVEGTPEECLQHFLFHCGVINPSWSELRN

SEQ ID NO: 3293 - protein, 44 aa, Homo sapiens
  SITE 14: note = Phosphorylated residue
  SITE 19: note = Phosphorylated residue
  SITE 25: note = Phosphorylated residue
  SITE 37: note = Phosphorylated residue
  SITE 38: note = Phosphorylated residue
  SITE 42: note = Phosphorylated residue
RILTIYPQVLHSLMEARWNHELAGCEMTLDAFAAMACTEMLTRN

SEQ ID NO: 3294 - protein, 21 aa, Homo sapiens
  SITE 3: note = Phosphorylated residue
  SITE 18: note = Phosphorylated residue
RSCVQSAVGMLRDQNESCTRN

SEQ ID NO: 3295 - protein, 32 aa, Homo sapiens; identical to SEQ ID NO: 1681
  SITE 11: note = Phosphorylated residue
  SITE 14: note = Phosphorylated residue

SEQ ID NO: 3296 - protein, 12 aa, Homo sapiens
  SITE 4: note = Phosphorylated residue
KSNCTLRDVLRA

SEQ ID NO: 3297 - protein, 14 aa, Homo sapiens
  SITE 7: note = Phosphorylated residue
RKTEDECSFVSLRD

SEQ ID NO: 3298 - protein, 21 aa, Homo sapiens
  SITE 2: note = Phosphorylated residue
KCLRENSDVKTHGPFEAVMRT

SEQ ID NO: 3299 - protein, 12 aa, Homo sapiens
  SITE 4: note = Phosphorylated residue
KSNCTLRDVLRA

SEQ ID NO: 3300 - protein, 16 aa, Homo sapiens
  SITE 14: note = Phosphorylated residue
KEGGDVTELLAALCRQ

SEQ ID NO: 3301 - protein, 24 aa, Homo sapiens
  SITE 4: note = Phosphorylated residue
KGICSSDILVQDRVQGYFASFAKA

SEQ ID NO: 3302 - protein, 26 aa, Homo sapiens
  SITE 15: note = Phosphorylated residue
KMPLKTLHPLLEDGCIEDDPAPHKKV

SEQ ID NO: 3303 - protein, 22 aa, Homo sapiens
  SITE 15: note = Phosphorylated residue
RVVLLLGLLNEDDACHASFLRV

SEQ ID NO: 3304 - protein, 16 aa, Homo sapiens
  SITE 6: note = Phosphorylated residue
KSGDACIAEYQQAGRG

SEQ ID NO: 3305 - protein, 26 aa, Homo sapiens
  SITE 15: note = Phosphorylated residue
KMPLKTLHPLLEDGCIEDDPAPHKKV

SEQ ID NO: 3306 - protein, 20 aa, Homo sapiens
  SITE 3: note = Phosphorylated residue
RLCGTDEKILANVTEDAKRL

SEQ ID NO: 3307 - protein, 20 aa, Homo sapiens
  SITE 4: note = Phosphorylated residue
KVTCRPPKEVIDMELSALRS

SEQ ID NO: 3308 - protein, 28 aa, Homo sapiens
  SITE 14: note = Phosphorylated residue
RSDTEPGMDLWEFCSETFQRPYQYLRRF

SEQ ID NO: 3309 - protein, 13 aa, Homo sapiens
  SITE 6: note = Phosphorylated residue
KAVLECKPLGIKT

SEQ ID NO: 3310 - protein, 25 aa, Homo sapiens
  SITE 10: note = Phosphorylated residue
KQVHLVSFQCSPHSTPQGIISTFRQ

SEQ ID NO: 3311 - protein, 20 aa, Homo sapiens
  SITE 4: note = Phosphorylated residue
KVTCRPPKEVIDMELSALRS

SEQ ID NO: 3312 - protein, 28 aa, Homo sapiens
  SITE 22: note = Phosphorylated residue
KESEILPEMASQFPEEILLASCVSVWKT

SEQ ID NO: 3313 - protein, 28 aa, Homo sapiens
  SITE 13: note = Phosphorylated residue
RSLKQVHLVSFQCSPHSTPQGIISTFRQ

SEQ ID NO: 3314 - protein, 21 aa, Homo sapiens
  SITE 3: note = Phosphorylated residue
KACKTPQSQQSAYFLLTLFRE

SEQ ID NO: 3315 - protein, 9 aa, Homo sapiens
  SITE 5: note = Phosphorylated residue
RIRLCLDRA

SEQ ID NO: 3316 - protein, 17 aa, Homo sapiens
  SITE 4: note = Phosphorylated residue
REACNQDALQEAGTFRH

SEQ ID NO: 3317 - protein, 48 aa, Homo sapiens
  SITE 26: note = Phosphorylated residue
RLSQAFIDLHSAGNMLFRTWIAMAYCSPKQGVSLQMDFGLDLVTELKE

SEQ ID NO: 3318 - protein, 19 aa, Homo sapiens
  SITE 8: note = Phosphorylated residue
KHSEEMICRLESAGLGYRV

SEQ ID NO: 3319 - protein, 21 aa, Homo sapiens
  SITE 2: note = Phosphorylated residue
KCLRENSDVKTHGPFEAVMRT

SEQ ID NO: 3320 - protein, 18 aa, Homo sapiens
  SITE 7: note = Phosphorylated residue
RKTEDECSFVSLRDVERC

SEQ ID NO: 3321 - protein, 18 aa, Homo sapiens
  SITE 7: note = Phosphorylated residue
RKTEDECSFVSLRDVERC

SEQ ID NO: 3322 - protein, 19 aa, Homo sapiens
  SITE 8: note = Phosphorylated residue
RLLTSHDCEILESEVTGRA

SEQ ID NO: 3323 - protein, 22 aa, Homo sapiens
  SITE 4: note = Phosphorylated residue
KTHCQEAETKTKDEMAAAEEKV

SEQ ID NO: 3324 - protein, 13 aa, Homo sapiens
  SITE 6: note = Phosphorylated residue
KAVLECKPLGIKT

SEQ ID NO: 3325 - protein, 21 aa, Homo sapiens
  SITE 14: note = Phosphorylated residue
KQPPATTPPFKTHCQEAETKT

SEQ ID NO: 3326 - protein, 48 aa, Homo sapiens
  SITE 38: note = Phosphorylated residue
KQILGQLDGGSVAVLPVVDSTNQYLLDRIGELKSGDACIAEYQQAGRG

SEQ ID NO: 3327 - protein, 48 aa, Homo sapiens; identical to SEQ ID NO: 3326
  SITE 38: note = Phosphorylated residue

SEQ ID NO: 3328 - protein, 16 aa, Homo sapiens
  SITE 6: note = Phosphorylated residue
KSGDACIAEYQQAGRG

SEQ ID NO: 3329 - protein, 17 aa, Homo sapiens
  SITE 4: note = Phosphorylated residue
REACNQDALQEAGTFRH

SEQ ID NO: 3330 - protein, 22 aa, Homo sapiens
  SITE 4: note = Phosphorylated residue
KTHCQEAETKTKDEMAAAEEKV

SEQ ID NO: 3331 - protein, 28 aa, Homo sapiens
  SITE 14: note = Phosphorylated residue
RSDTEPGMDLWEFCSETFQRPYQYLRRF

SEQ ID NO: 3332 - protein, 11 aa, Homo sapiens
  SITE 9: note = Phosphorylated residue
KDQEYTQLCRN

SEQ ID NO: 3333 - protein, 9 aa, Homo sapiens
  SITE 2: note = Phosphorylated residue
RCVDSLLKM

SEQ ID NO: 3334 - protein, 12 aa, Homo sapiens
  SITE 7: note = Phosphorylated residue
RFSEVFCSVQRL

SEQ ID NO: 3335 - protein, 23 aa, Homo sapiens
  SITE 16: note = Phosphorylated residue
RMKQPPATTPPFKTHCQEAETKT

SEQ ID NO: 3336 - protein, 14 aa, Homo sapiens
  SITE 10: note = Phosphorylated residue
KSTDFLPVDCPVRS

SEQ ID NO: 3337 - protein, 48 aa, Homo sapiens; identical to SEQ ID NO: 3326
  SITE 38: note = Phosphorylated residue

SEQ ID NO: 3338 - protein, 16 aa, Homo sapiens
  SITE 7: note = Phosphorylated residue
KSILLNCATPDAVVRL

SEQ ID NO: 3339 - protein, 9 aa, Homo sapiens
  SITE 2: note = Phosphorylated residue
RCVDSLLKM

SEQ ID NO: 3340 - protein, 14 aa, Homo sapiens
  SITE 4: note = Phosphorylated residue
KGICSSDILVQDRV

SEQ ID NO: 3341 - protein, 28 aa, Homo sapiens
  SITE 22: note = Phosphorylated residue
KESEILPEMASQFPEEILLASCVSVWKT

SEQ ID NO: 3342 - protein, 17 aa, Homo sapiens
  SITE 4: note = Phosphorylated residue
REACNQDALQEAGTFRH

SEQ ID NO: 3343 - protein, 23 aa, Homo sapiens
  SITE 16: note = Phosphorylated residue
RMKQPPATTPPFKTHCQEAETKT

SEQ ID NO: 3344 - protein, 20 aa, Homo sapiens
  SITE 14: note = Phosphorylated residue
RSHNASLHPTPEQCEAVSKF

SEQ ID NO: 3345 - protein, 11 aa, Homo sapiens
  SITE 9: note = Phosphorylated residue
KDQEYTQLCRN

SEQ ID NO: 3346 - protein, 17 aa, Homo sapiens
  SITE 4: note = Phosphorylated residue
REACNQDALQEAGTFRH

SEQ ID NO: 3347 - protein, 21 aa, Homo sapiens
  SITE 11: note = Phosphorylated residue
RIGELKSGDACIAEYQQAGRG

SEQ ID NO: 3348 - protein, 28 aa, Homo sapiens
  SITE 3: note = Phosphorylated residue
RLCLTLGIPQATDPDKTYELTTDNMLKI

SEQ ID NO: 3349 - protein, 23 aa, Homo sapiens
  SITE 16: note = Phosphorylated residue
RMKQPPATTPPFKTHCQEAETKT

SEQ ID NO: 3350 - protein, 16 aa, Homo sapiens
  SITE 6: note = Phosphorylated residue
KSGDACIAEYQQAGRG

SEQ ID NO: 3351 - protein, 13 aa, Homo sapiens
  SITE 6: note = Phosphorylated residue
KAVLECKPLGIKT

SEQ ID NO: 3352 - protein, 14 aa, Homo sapiens
  SITE 2: note = Phosphorylated residue
KCSEEVSPMQLIKQ

SEQ ID NO: 3353 - protein, 33 aa, Homo sapiens; identical to SEQ ID NO: 286
  SITE 16: note = Phosphorylated residue

SEQ ID NO: 3354 - protein, 33 aa, Homo sapiens; identical to SEQ ID NO: 286
  SITE 16: note = Phosphorylated residue

SEQ ID NO: 3355 - protein, 20 aa, Homo sapiens
  SITE 3: note = Phosphorylated residue
RLCGTDEKILANVTEDAKRL

SEQ ID NO: 3356 - protein, 17 aa, Homo sapiens
  SITE 6: note = Phosphorylated residue
RGLGLCATALVSYLIRL

SEQ ID NO: 3357 - protein, 22 aa, Homo sapiens
  SITE 11: note = Phosphorylated residue
KTLHPLLEDGCIEDDPAPHKKV

SEQ ID NO: 3358 - protein, 19 aa, Homo sapiens
  SITE 6: note = Phosphorylated residue
KSGDACIAEYQQAGRGSRG

SEQ ID NO: 3359 - protein, 27 aa, Homo sapiens
  SITE 14: note = Phosphorylated residue
RSDTEPGMDLWEFCSETFQRPYQYLRR

SEQ ID NO: 3360 - protein, 14 aa, Homo sapiens
  SITE 10: note = Phosphorylated residue
KSTDFLPVDCPVRS

SEQ ID NO: 3361 - protein, 33 aa, Homo sapiens; identical to SEQ ID NO: 286
  SITE 16: note = Phosphorylated residue

SEQ ID NO: 3362 - protein, 13 aa, Homo sapiens
  SITE 3: note = Phosphorylated residue
RSCVQSAVGMLRD

SEQ ID NO: 3363 - protein, 20 aa, Homo sapiens
  SITE 4: note = Phosphorylated residue
KVTCRPPKEVIDMELSALRS

SEQ ID NO: 3364 - protein, 26 aa, Homo sapiens
  SITE 15: note = Phosphorylated residue
KMPLKTLHPLLEDGCIEDDPAPHKKV

SEQ ID NO: 3365 - protein, 22 aa, Homo sapiens
  SITE 11: note = Phosphorylated residue
KTLHPLLEDGCIEDDPAPHKKV

SEQ ID NO: 3366 - protein, 20 aa, Homo sapiens
  SITE 3: note = Phosphorylated residue
RLCGTDEKILANVTEDAKRL

SEQ ID NO: 3367 - protein, 27 aa, Homo sapiens
  SITE 14: note = Phosphorylated residue
RSDTEPGMDLWEFCSETFQRPYQYLRR

SEQ ID NO: 3368 - protein, 17 aa, Homo sapiens
  SITE 4: note = Phosphorylated residue
REACNQDALQEAGTFRH

SEQ ID NO: 3369 - protein, 22 aa, Homo sapiens
  SITE 11: note = Phosphorylated residue
KTLHPLLEDGCIEDDPAPHKKV

SEQ ID NO: 3370 - protein, 23 aa, Homo sapiens
  SITE 16: note = Phosphorylated residue
RMKQPPATTPPFKTHCQEAETKT

SEQ ID NO: 3371 - protein, 22 aa, Homo sapiens
  SITE 4: note = Phosphorylated residue
KTHCQEAETKTKDEMAAAEEKV

SEQ ID NO: 3372 - protein, 16 aa, Homo sapiens
  SITE 6: note = Phosphorylated residue
KSGDACIAEYQQAGRG

SEQ ID NO: 3373 - protein, 16 aa, Homo sapiens
  SITE 7: note = Phosphorylated residue
KSILLNCATPDAVVRL

SEQ ID NO: 3374 - protein, 27 aa, Homo sapiens
  SITE 14: note = Phosphorylated residue
RSDTEPGMDLWEFCSETFQRPYQYLRR

SEQ ID NO: 3375 - protein, 48 aa, Homo sapiens; identical to SEQ ID NO: 3326
  SITE 38: note = Phosphorylated residue

SEQ ID NO: 3376 - protein, 23 aa, Homo sapiens
  SITE 16: note = Phosphorylated residue
RMKQPPATTPPFKTHCQEAETKT

SEQ ID NO: 3377 - protein, 23 aa, Homo sapiens
  SITE 16: note = Phosphorylated residue
RMKQPPATTPPFKTHCQEAETKT

SEQ ID NO: 3378 - protein, 28 aa, Homo sapiens
  SITE 3: note = Phosphorylated residue
RLCLTLGIPQATDPDKTYELTTDNMLKI

SEQ ID NO: 3379 - protein, 20 aa, Homo sapiens
  SITE 14: note = Phosphorylated residue
RSHNASLHPTPEQCEAVSKF

SEQ ID NO: 3380 - protein, 26 aa, Homo sapiens
  SITE 15: note = Phosphorylated residue
KMPLKTLHPLLEDGCIEDDPAPHKKV

SEQ ID NO: 3381 - protein, 22 aa, Homo sapiens
  SITE 11: note = Phosphorylated residue
KTLHPLLEDGCIEDDPAPHKKV

SEQ ID NO: 3382 - protein, 22 aa, Homo sapiens
  SITE 15: note = Phosphorylated residue
RVVLLLGLLNEDDACHASFLRV

SEQ ID NO: 3383 - protein, 20 aa, Homo sapiens
  SITE 14: note = Phosphorylated residue
RSHNASLHPTPEQCEAVSKF

SEQ ID NO: 3384 - protein, 22 aa, Homo sapiens
  SITE 11: note = Phosphorylated residue
KTLHPLLEDGCIEDDPAPHKKV

SEQ ID NO: 3385 - protein, 22 aa, Homo sapiens
  SITE 11: note = Phosphorylated residue
KTLHPLLEDGCIEDDPAPHKKV

SEQ ID NO: 3386 - protein, 33 aa, Homo sapiens; identical to SEQ ID NO: 286
  SITE 16: note = Phosphorylated residue

SEQ ID NO: 3387 - protein, 27 aa, Homo sapiens
  SITE 17: note = Phosphorylated residue
RGSPNETELIESAKGICSSDILVQDRV

SEQ ID NO: 3388 - protein, 22 aa, Homo sapiens
  SITE 11: note = Phosphorylated residue
KTLHPLLEDGCIEDDPAPHKKV

SEQ ID NO: 3389 - protein, 28 aa, Homo sapiens
  SITE 13: note = Phosphorylated residue
RSLKQVHLVSFQCSPHSTPQGIISTFRQ

SEQ ID NO: 3390 - protein, 40 aa, Homo sapiens; identical to SEQ ID NO: 301
  SITE 38: note = Phosphorylated residue

SEQ ID NO: 3391 - protein, 22 aa, Homo sapiens
  SITE 11: note = Phosphorylated residue
KTLHPLLEDGCIEDDPAPHKKV

SEQ ID NO: 3392 - protein, 22 aa, Homo sapiens
  SITE 4: note = Phosphorylated residue
KTHCQEAETKTKDEMAAAEEKV

SEQ ID NO: 3393 - protein, 22 aa, Homo sapiens
  SITE 11: note = Phosphorylated residue
KTLHPLLEDGCIEDDPAPHKKV

SEQ ID NO: 3394 - protein, 40 aa, Homo sapiens; identical to SEQ ID NO: 301
  SITE 38: note = Phosphorylated residue

SEQ ID NO: 3395 - protein, 15 aa, Homo sapiens
KVHGGTTADMIYSRV

SEQ ID NO: 3396 - protein, 14 aa, Homo sapiens
RLLQEQHQLSSRRL

SEQ ID NO: 3397 - protein, 14 aa, Homo sapiens
RRLLNFDTELSTKE

SEQ ID NO: 3398 - protein, 12 aa, Homo sapiens
RFFPKPYDDSRL

SEQ ID NO: 3399 - protein, 13 aa, Homo sapiens
KILANVTEDAKRL

SEQ ID NO: 3400 - protein, 18 aa, Homo sapiens
RKQPPSDAALTMLSFIKS

SEQ ID NO: 3401 - protein, 12 aa, Homo sapiens
RFFPKPYDDSRL

SEQ ID NO: 3402 - protein, 20 aa, Homo sapiens
KVGKNEQGEPEDLKKPEGKN

SEQ ID NO: 3403 - protein, 20 aa, Homo sapiens
RFRPQWSLRDTLVSYMQTKE

SEQ ID NO: 3404 - protein, 8 aa, Homo sapiens
RNLEWLKT

SEQ ID NO: 3405 - protein, 8 aa, Homo sapiens
RNLEWLKT

SEQ ID NO: 3406 - protein, 34 aa, Homo sapiens
KTVNESHGSVERSSLTLATAINQRGIYVIQAPKG

SEQ ID NO: 3407 - protein, 20 aa, Homo sapiens
KHIQTLRDWGVDVFTVPGKG

SEQ ID NO: 3408 - protein, 14 aa, Homo sapiens
KHFPIPLINRLEKH

SEQ ID NO: 3409 - protein, 19 aa, Homo sapiens
KASNRKPSPQDIAQAVLRN

SEQ ID NO: 3410 - protein, 11 aa, Homo sapiens
RVSMEETADRL

SEQ ID NO: 3411 - protein, 15 aa, Homo sapiens
RAQDLFLDGVPLRKT

SEQ ID NO: 3412 - protein, 14 aa, Homo sapiens
RSAEKLQLPPLERL

SEQ ID NO: 3413 - protein, 29 aa, Homo sapiens
KQILGQLDGGSVAVLPVVDSTNQYLLDRI

SEQ ID NO: 3414 - protein, 12 aa, Homo sapiens
RFFPKPYDDSRL

SEQ ID NO: 3415 - protein, 15 aa, Homo sapiens
KLIIGDKEIFGISRG

SEQ ID NO: 3416 - protein, 15 aa, Homo sapiens
KVHGGTTADMIYSRV

SEQ ID NO: 3417 - protein, 16 aa, Homo sapiens
RFATSLVDNSVPLLRA

SEQ ID NO: 3418 - protein, 12 aa, Homo sapiens
KASWTVQESKKK

SEQ ID NO: 3419 - protein, 14 aa, Homo sapiens
RHAIFTEITTFSRL

SEQ ID NO: 3420 - protein, 15 aa, Homo sapiens
RVKWPNDLYLQDRKL

SEQ ID NO: 3421 - protein, 29 aa, Homo sapiens
RGIDKQGALLLEQDGVIKPWMGGEISLRS

SEQ ID NO: 3422 - protein, 17 aa, Homo sapiens
RNTLKPSPQAWLQLVKN

SEQ ID NO: 3423 - protein, 11 aa, Homo sapiens
KILSPPDISRF

SEQ ID NO: 3424 - protein, 9 aa, Homo sapiens
REVAILYRS

SEQ ID NO: 3425 - protein, 14 aa, Homo sapiens
RVPFNVDFDKLPRH

SEQ ID NO: 3426 - protein, 15 aa, Homo sapiens
KVHGGTTADMIYSRV

SEQ ID NO: 3427 - protein, 11 aa, Homo sapiens
KYSVINEINKI

SEQ ID NO: 3428 - protein, 48 aa, Homo sapiens
KRWESEPHPYVFFNDDHTTMTFIGFHLQPNINGSVDAISHLTGKVIKR

SEQ ID NO: 3429 - protein, 25 aa, Homo sapiens
KGIPTLVYRHDWNYEHLFMDIKNKM

SEQ ID NO: 3430 - protein, 16 aa, Homo sapiens
RTRVPQFSFLDIFPKV

SEQ ID NO: 3431 - protein, 10 aa, Homo sapiens
RIIMEQSMRC

SEQ ID NO: 3432 - protein, 19 aa, Homo sapiens
KASNRKPSPQDIAQAVLRN

SEQ ID NO: 3433 - protein, 12 aa, Homo sapiens
KALDKDQYLPRK

SEQ ID NO: 3434 - protein, 39 aa, Homo sapiens; identical to SEQ ID NO: 496

SEQ ID NO: 3435 - protein, 24 aa, Homo sapiens
KILIFQTDFEDGIRSAQLIASAKY

SEQ ID NO: 3436 - protein, 14 aa, Homo sapiens
RMKQPPATTPPFKT

SEQ ID NO: 3437 - protein, 12 aa, Homo sapiens
KASWTVQESKKK

SEQ ID NO: 3438 - protein, 20 aa, Homo sapiens
KVGKNEQGEPEDLKKPEGKN

SEQ ID NO: 3439 - protein, 12 aa, Homo sapiens
RSTLMVSDVTRL

SEQ ID NO: 3440 - protein, 25 aa, Homo sapiens
KILSPPDISRFATSLVDNSVPLLRA

SEQ ID NO: 3441 - protein, 20 aa, Homo sapiens
RVEQIKEYHHLHQAVHAAKV

SEQ ID NO: 3442 - protein, 10 aa, Homo sapiens
RISSNPVAKI

SEQ ID NO: 3443 - protein, 11 aa, Homo sapiens
RLESAGLGYRV

SEQ ID NO: 3444 - protein, 12 aa, Homo sapiens
RDTLVSYMQTKE

SEQ ID NO: 3445 - protein, 15 aa, Homo sapiens
RLVEIQFPAEHGWKE

SEQ ID NO: 3446 - protein, 13 aa, Homo sapiens
KHYLDINTVLEKW

SEQ ID NO: 3447 - protein, 16 aa, Homo sapiens
RTRVPQFSFLDIFPKV

SEQ ID NO: 3448 - protein, 25 aa, Homo sapiens
RAAINKHIQTLRDWGVDVFTVPGKG

SEQ ID NO: 3449 - protein, 19 aa, Homo sapiens
KETSELGGSDVSILDTTRL

SEQ ID NO: 3450 - protein, 20 aa, Homo sapiens
KDVVKQQGLRQDHPGQMDRY

SEQ ID NO: 3451 - protein, 11 aa, Homo sapiens
RVSMEETADRL

SEQ ID NO: 3452 - protein, 9 aa, Homo sapiens
RYLWQHLKK

SEQ ID NO: 3453 - protein, 21 aa, Homo sapiens
KVPGGEQEDAESRYLLVLTKN

SEQ ID NO: 3454 - protein, 11 aa, Homo sapiens
KILSPPDISRF

SEQ ID NO: 3455 - protein, 11 aa, Homo sapiens
RREELLLLKKE

SEQ ID NO: 3456 - protein, 13 aa, Homo sapiens
RLLQEQHQLSSRR

SEQ ID NO: 3457 - protein, 10 aa, Homo sapiens
KMKMQLNVKN

SEQ ID NO: 3458 - protein, 15 aa, Homo sapiens
KVHGGTTADMIYSRV

SEQ ID NO: 3459 - protein, 19 aa, Homo sapiens
KDDIQALDIFLANLPEAKC

SEQ ID NO: 3460 - protein, 20 aa, Homo sapiens
KTIVADAMQGPAAYSDLFRS

SEQ ID NO: 3461 - protein, 29 aa, Homo sapiens
RGIDKQGALLLEQDGVIKPWMGGEISLRS

SEQ ID NO: 3462 - protein, 22 aa, Homo sapiens
RELRAALELFEQEGLAPYLPRW

SEQ ID NO: 3463 - protein, 22 aa, Homo sapiens
KHMVTMDGVREEDLAPFSLRKR

SEQ ID NO: 3464 - protein, 17 aa, Homo sapiens
RKRITVEYLQHIVEQKN

SEQ ID NO: 3465 - protein, 16 aa, Homo sapiens
REKQHLLSIDEPLFRS

SEQ ID NO: 3466 - protein, 16 aa, Homo sapiens
RTRVPQFSFLDIFPKV

SEQ ID NO: 3467 - protein, 10 aa, Homo sapiens
RIIMEQSMRC

SEQ ID NO: 3468 - protein, 19 aa, Homo sapiens
RAALELFEQEGLAPYLPRW

SEQ ID NO: 3469 - protein, 14 aa, Homo sapiens
RVPQFSFLDIFPKV

SEQ ID NO: 3470 - protein, 14 aa, Homo sapiens
KHKNQFLDIWQLRE

SEQ ID NO: 3471 - protein, 22 aa, Homo sapiens
KDRVEQIKEYHHLHQAVHAAKV

SEQ ID NO: 3472 - protein, 18 aa, Homo sapiens
RATHYHLSSQVQEMAGKI

SEQ ID NO: 3473 - protein, 10 aa, Homo sapiens
KLQLPPLERL

SEQ ID NO: 3474 - protein, 14 aa, Homo sapiens
RRLLQEQHQLSSRR

SEQ ID NO: 3475 - protein, 20 aa, Homo sapiens
RHILELEEVYDYLYQPSYRK

SEQ ID NO: 3476 - protein, 17 aa, Homo sapiens
RNDELNHLEEEGRFLKA

SEQ ID NO: 3477 - protein, 29 aa, Homo sapiens
KQILGQLDGGSVAVLPVVDSTNQYLLDRI

SEQ ID NO: 3478 - protein, 24 aa, Homo sapiens
RNFSGKDDIQALDIFLANLPEAKC

SEQ ID NO: 3479 - protein, 14 aa, Homo sapiens
RMKQPPATTPPFKT

SEQ ID NO: 3480 - protein, 20 aa, Homo sapiens
RVEQIKEYHHLHQAVHAAKV

SEQ ID NO: 3481 - protein, 23 aa, Homo sapiens
RQRHNSFADFLQAHLHTADLERH

SEQ ID NO: 3482 - protein, 12 aa, Homo sapiens
RFFPKPYDDSRL

SEQ ID NO: 3483 - protein, 17 aa, Homo sapiens
KIDLLRDSHIFQLFWRE

SEQ ID NO: 3484 - protein, 24 aa, Homo sapiens
RNFSGKDDIQALDIFLANLPEAKC

SEQ ID NO: 3485 - protein, 25 aa, Homo sapiens
KQQGLRQDHPGQMDRYLVYGDEYKA

SEQ ID NO: 3486 - protein, 23 aa, Homo sapiens
RGMEFVQGLSKPGRPHQWVFPKD

SEQ ID NO: 3487 - protein, 14 aa, Homo sapiens
RSAEKLQLPPLERL

SEQ ID NO: 3488 - protein, 14 aa, Homo sapiens
KQTLSAAAVFNDRL

SEQ ID NO: 3489 - protein, 21 aa, Homo sapiens
KSGEVTLAEIDVIFKDFVNKY

SEQ ID NO: 3490 - protein, 25 aa, Homo sapiens
KIKDYLEELWVQAQYITDAEGLPKK

SEQ ID NO: 3491 - protein, 25 aa, Homo sapiens
KEMRNNWEKEIAAVISPELEHLDKT

SEQ ID NO: 3492 - protein, 12 aa, Homo sapiens
KQPPATTPPFKT

SEQ ID NO: 3493 - protein, 19 aa, Homo sapiens
RNLEWLKTVNESHGSVERS

SEQ ID NO: 3494 - protein, 25 aa, Homo sapiens
KQQGLRQDHPGQMDRYLVYGDEYKA

SEQ ID NO: 3495 - protein, 11 aa, Homo sapiens
KILSPPDISRF

SEQ ID NO: 3496 - protein, 14 aa, Homo sapiens
RVPQFSFLDIFPKV

SEQ ID NO: 3497 - protein, 15 aa, Homo sapiens
KKFVDIFQQTPLGRF

SEQ ID NO: 3498 - protein, 25 aa, Homo sapiens
KLDNFINRPVKLIIGDKEIFGISRG

SEQ ID NO: 3499 - protein, 23 aa, Homo sapiens
KTSAYSRNDELNHLEEEGRFLKA

SEQ ID NO: 3500 - protein, 9 aa, Homo sapiens
RYLLVLTKN

SEQ ID NO: 3501 - protein, 15 aa, Homo sapiens
RAQDLFLDGVPLRKT

SEQ ID NO: 3502 - protein, 9 aa, Homo sapiens
RFLNYQLRD

SEQ ID NO: 3503 - protein, 24 aa, Homo sapiens
KISPDTVLHLILPESPGSHEESRE

SEQ ID NO: 3504 - protein, 22 aa, Homo sapiens
KDRVEQIKEYHHLHQAVHAAKV

SEQ ID NO: 3505 - protein, 14 aa, Homo sapiens
KRLIAVADSVLTKV

SEQ ID NO: 3506 - protein, 18 aa, Homo sapiens
RATHYHLSSQVQEMAGKI

SEQ ID NO: 3507 - protein, 12 aa, Homo sapiens
KLDNFINRPVKL

SEQ ID NO: 3508 - protein, 12 aa, Homo sapiens
RFFPKPYDDSRL

SEQ ID NO: 3509 - protein, 18 aa, Homo sapiens
RATHYHLSSQVQEMAGKI

SEQ ID NO: 3510 - protein, 15 aa, Homo sapiens
RKPSPQDIAQAVLRN

SEQ ID NO: 3511 - protein, 9 aa, Homo sapiens
RFLNYQLRD

SEQ ID NO: 3512 - protein, 20 aa, Homo sapiens
KHIQTLRDWGVDVFTVPGKG

SEQ ID NO: 3513 - protein, 16 aa, Homo sapiens
KHKNQFLDIWQLREKS

SEQ ID NO: 3514 - protein, 9 aa, Homo sapiens
RFLNYQLRD

SEQ ID NO: 3515 - protein, 16 aa, Homo sapiens
RTRVPQFSFLDIFPKV

SEQ ID NO: 3516 - protein, 18 aa, Homo sapiens
KTPQSQQSAYFLLTLFRE

SEQ ID NO: 3517 - protein, 20 aa, Homo sapiens
RVEQIKEYHHLHQAVHAAKV

SEQ ID NO: 3518 - protein, 16 aa, Homo sapiens
KTLPTMNNLISQDKRI

SEQ ID NO: 3519 - protein, 20 aa, Homo sapiens
RGREPANEASVEYLQEVARI

SEQ ID NO: 3520 - protein, 14 aa, Homo sapiens
RSLETNGEINLPKD

SEQ ID NO: 3521 - protein, 21 aa, Homo sapiens
KHMVTMDGVREEDLAPFSLRK

SEQ ID NO: 3522 - protein, 9 aa, Homo sapiens
KDLEQLAKM

SEQ ID NO: 3523 - protein, 10 aa, Homo sapiens
KGIPTLVYRH

SEQ ID NO: 3524 - protein, 12 aa, Homo sapiens
KRQDKEFFGLRD

SEQ ID NO: 3525 - protein, 15 aa, Homo sapiens
KVHGGTTADMIYSRV

SEQ ID NO: 3526 - protein, 24 aa, Homo sapiens
KDLQQYVSVVVLDEVGLAEDSPKM

SEQ ID NO: 3527 - protein, 11 aa, Homo sapiens
KILSPPDISRF

SEQ ID NO: 3528 - protein, 14 aa, Homo sapiens
RSAEKLQLPPLERL

SEQ ID NO: 3529 - protein, 19 aa, Homo sapiens
RYLVYGDEYKALRDAVAKA

SEQ ID NO: 3530 - protein, 11 aa, Homo sapiens
RSAQLIASAKY

SEQ ID NO: 3531 - protein, 29 aa, Homo sapiens
RGIDKQGALLLEQDGVIKPWMGGEISLRS

SEQ ID NO: 3532 - protein, 9 aa, Homo sapiens
RLIVIEEKD

SEQ ID NO: 3533 - protein, 13 aa, Homo sapiens
RLLQEQHQLSSRR

SEQ ID NO: 3534 - protein, 29 aa, Homo sapiens
RGIDKQGALLLEQDGVIKPWMGGEISLRS

SEQ ID NO: 3535 - protein, 17 aa, Homo sapiens
KIIYGDPVTFLPHLPRK

SEQ ID NO: 3536 - protein, 29 aa, Homo sapiens
RFQQGKDLQQYVSVVVLDEVGLAEDSPKM

SEQ ID NO: 3537 - protein, 23 aa, Homo sapiens
RVSMEETADRLGSIPLRQLVYRV

SEQ ID NO: 3538 - protein, 20 aa, Homo sapiens
KTIVADAMQGPAAYSDLFRS

SEQ ID NO: 3539 - protein, 12 aa, Homo sapiens
RFFPKPYDDSRL

SEQ ID NO: 3540 - protein, 10 aa, Homo sapiens
REELLLLKKE

SEQ ID NO: 3541 - protein, 13 aa, Homo sapiens
RLLNFDTELSTKE

SEQ ID NO: 3542 - protein, 17 aa, Homo sapiens
RKRITVEYLQHIVEQKN

SEQ ID NO: 3543 - protein, 20 aa, Homo sapiens
KVGKNEQGEPEDLKKPEGKN

SEQ ID NO: 3544 - protein, 10 aa, Homo sapiens
RISSNPVAKI

SEQ ID NO: 3545 - protein, 37 aa, Homo sapiens; identical to SEQ ID NO: 408

SEQ ID NO: 3546 - protein, 24 aa, Homo sapiens
RNFSGKDDIQALDIFLANLPEAKC

SEQ ID NO: 3547 - protein, 9 aa, Homo sapiens
KDLEQLAKM

SEQ ID NO: 3548 - protein, 15 aa, Homo sapiens
KVHGGTTADMIYSRV

SEQ ID NO: 3549 - protein, 15 aa, Homo sapiens
RDLSHILGIPQSWRL

SEQ ID NO: 3550 - protein, 20 aa, Homo sapiens
KTSAYSRNDELNHLEEEGRF

SEQ ID NO: 3551 - protein, 12 aa, Homo sapiens
KALDKDQYLPRK

SEQ ID NO: 3552 - protein, 29 aa, Homo sapiens
RGIDKQGALLLEQDGVIKPWMGGEISLRS

SEQ ID NO: 3553 - protein, 12 aa, Homo sapiens
KLDNFINRPVKL

SEQ ID NO: 3554 - protein, 9 aa, Homo sapiens
RDYYSLIKM

SEQ ID NO: 3555 - protein, 25 aa, Homo sapiens
RAPKPTLLWLQQFDTEYSFLKEVRN

SEQ ID NO: 3556 - protein, 11 aa, Homo sapiens
KILSPPDISRF

SEQ ID NO: 3557 - protein, 24 aa, Homo sapiens
RNFSGKDDIQALDIFLANLPEAKC

SEQ ID NO: 3558 - protein, 14 aa, Homo sapiens
KGLEDSVAKTFEKC

SEQ ID NO: 3559 - protein, 9 aa, Homo sapiens
RYLLVLTKN

SEQ ID NO: 3560 - protein, 13 aa, Homo sapiens
RLLNFDTELSTKE

SEQ ID NO: 3561 - protein, 11 aa, Homo sapiens
KILSPPDISRF

SEQ ID NO: 3562 - protein, 14 aa, Homo sapiens
RVKWPNDLYLQDRK

SEQ ID NO: 3563 - protein, 14 aa, Homo sapiens
RVPFNVDFDKLPRH

SEQ ID NO: 3564 - protein, 29 aa, Homo sapiens
RGIDKQGALLLEQDGVIKPWMGGEISLRS

SEQ ID NO: 3565 - protein, 14 aa, Homo sapiens
RVPFNVDFDKLPRH

SEQ ID NO: 3566 - protein, 25 aa, Homo sapiens
RAAINKHIQTLRDWGVDVFTVPGKG

SEQ ID NO: 3567 - protein, 34 aa, Homo sapiens; identical to SEQ ID NO: 67

SEQ ID NO: 3568 - protein, 21 aa, Homo sapiens
KHMVTMDGVREEDLAPFSLRK

SEQ ID NO: 3569 - protein, 12 aa, Homo sapiens
KFLPEILALQRD

SEQ ID NO: 3570 - protein, 22 aa, Homo sapiens
KDRVEQIKEYHHLHQAVHAAKV

SEQ ID NO: 3571 - protein, 19 aa, Homo sapiens
KASNRKPSPQDIAQAVLRN

SEQ ID NO: 3572 - protein, 10 aa, Homo sapiens
KLQLPPLERL

SEQ ID NO: 3573 - protein, 14 aa, Homo sapiens
RLHKEPFGEISSRY

SEQ ID NO: 3574 - protein, 12 aa, Homo sapiens
RFFPKPYDDSRL

SEQ ID NO: 3575 - protein, 14 aa, Homo sapiens
RSAEKLQLPPLERL

SEQ ID NO: 3576 - protein, 16 aa, Homo sapiens
KTLPTMNNLISQDKRI

SEQ ID NO: 3577 - protein, 10 aa, Homo sapiens
RYLWQHLKKH

SEQ ID NO: 3578 - protein, 10 aa, Homo sapiens
RLNDTVTVRL

SEQ ID NO: 3579 - protein, 10 aa, Homo sapiens
RREELLLLKK

SEQ ID NO: 3580 - protein, 20 aa, Homo sapiens
KDVVKQQGLRQDHPGQMDRY

SEQ ID NO: 3581 - protein, 21 aa, Homo sapiens
KMLGHSADETIGVVHLVLRRL

SEQ ID NO: 3582 - protein, 10 aa, Homo sapiens
KMKMQLNVKN

SEQ ID NO: 3583 - protein, 17 aa, Homo sapiens
RALTEELHQKVSEEAKS

SEQ ID NO: 3584 - protein, 23 aa, Homo sapiens
RLLLDEITRAQDLFLDGVPLRKT

SEQ ID NO: 3585 - protein, 12 aa, Homo sapiens
RFFPKPYDDSRL

SEQ ID NO: 3586 - protein, 19 aa, Homo sapiens
RNLEWLKTVNESHGSVERS

SEQ ID NO: 3587 - protein, 9 aa, Homo sapiens
RFLNYQLRD

SEQ ID NO: 3588 - protein, 17 aa, Homo sapiens
RALTEELHQKVSEEAKS

SEQ ID NO: 3589 - protein, 16 aa, Homo sapiens
REKQHLLSIDEPLFRS

SEQ ID NO: 3590 - protein, 14 aa, Homo sapiens
RRLLNFDTELSTKE

SEQ ID NO: 3591 - protein, 26 aa, Homo sapiens
KLIALLANGEFHSGEQLGETLGMSRA

SEQ ID NO: 3592 - protein, 11 aa, Homo sapiens
RSAQLIASAKY

SEQ ID NO: 3593 - protein, 15 aa, Homo sapiens
RLQKVMNHITDGPRK

SEQ ID NO: 3594 - protein, 20 aa, Homo sapiens
RDLVKQFQNVQQVEYSSIRG

SEQ ID NO: 3595 - protein, 23 aa, Homo sapiens
RGMEFVQGLSKPGRPHQWVFPKD

SEQ ID NO: 3596 - protein, 20 aa, Homo sapiens
KTIVADAMQGPAAYSDLFRS

SEQ ID NO: 3597 - protein, 14 aa, Homo sapiens
RSSLTLATAINQRG

SEQ ID NO: 3598 - protein, 9 aa, Homo sapiens
RLIVIEEKD

SEQ ID NO: 3599 - protein, 22 aa, Homo sapiens
KHMVTMDGVREEDLAPFSLRKR

SEQ ID NO: 3600 - protein, 10 aa, Homo sapiens
KLQLPPLERL

SEQ ID NO: 3601 - protein, 9 aa, Homo sapiens
RFLNYQLRD

SEQ ID NO: 3602 - protein, 25 aa, Homo sapiens
KQQGLRQDHPGQMDRYLVYGDEYKA

SEQ ID NO: 3603 - protein, 12 aa, Homo sapiens
RTADNFDDILKH

SEQ ID NO: 3604 - protein, 15 aa, Homo sapiens
RKPSPQDIAQAVLRN

SEQ ID NO: 3605 - protein, 18 aa, Homo sapiens
RENSDVKTHGPFEAVMRT

SEQ ID NO: 3606 - protein, 20 aa, Homo sapiens
RVEQIKEYHHLHQAVHAAKV

SEQ ID NO: 3607 - protein, 29 aa, Homo sapiens
RGIDKQGALLLEQDGVIKPWMGGEISLRS

SEQ ID NO: 3608 - protein, 10 aa, Homo sapiens
KLQLPPLERL

SEQ ID NO: 3609 - protein, 10 aa, Homo sapiens
RLLLDEITRA

SEQ ID NO: 3610 - protein, 9 aa, Homo sapiens
REVAILYRS

SEQ ID NO: 3611 - protein, 34 aa, Homo sapiens; identical to SEQ ID NO: 40

SEQ ID NO: 3612 - protein, 24 aa, Homo sapiens
RNFSGKDDIQALDIFLANLPEAKC

SEQ ID NO: 3613 - protein, 16 aa, Homo sapiens
RTRVPQFSFLDIFPKV

SEQ ID NO: 3614 - protein, 14 aa, Homo sapiens
RMKQPPATTPPFKT

SEQ ID NO: 3615 - protein, 14 aa, Homo sapiens
RLHKEPFGEISSRY

SEQ ID NO: 3616 - protein, 17 aa, Homo sapiens
KVMNHITDGPRKDLVKG

SEQ ID NO: 3617 - protein, 11 aa, Homo sapiens
KHVVPLPDGKS

SEQ ID NO: 3618 - protein, 17 aa, Homo sapiens
RNDELNHLEEEGRFLKA

SEQ ID NO: 3619 - protein, 17 aa, Homo sapiens
RNDELNHLEEEGRFLKA

SEQ ID NO: 3620 - protein, 15 aa, Homo sapiens
KEQKNQEADVQEVKA

SEQ ID NO: 3621 - protein, 15 aa, Homo sapiens
KVHGGTTADMIYSRV

SEQ ID NO: 3622 - protein, 37 aa, Homo sapiens; identical to SEQ ID NO: 408

SEQ ID NO: 3623 - protein, 23 aa, Homo sapiens
RLLLDEITRAQDLFLDGVPLRKT

SEQ ID NO: 3624 - protein, 17 aa, Homo sapiens
KVMNHITDGPRKDLVKG

SEQ ID NO: 3625 - protein, 14 aa, Homo sapiens
RSAAAVKNEKEQKN

SEQ ID NO: 3626 - protein, 37 aa, Homo sapiens; identical to SEQ ID NO: 408

SEQ ID NO: 3627 - protein, 18 aa, Homo sapiens
RKQPPSDAALTMLSFIKS

SEQ ID NO: 3628 - protein, 15 aa, Homo sapiens
RKPSPQDIAQAVLRN

SEQ ID NO: 3629 - protein, 23 aa, Homo sapiens
KDNAPPEKEVIESLLSLLFVQKG

SEQ ID NO: 3630 - protein, 14 aa, Homo sapiens
RSSLTLATAINQRG

SEQ ID NO: 3631 - protein, 9 aa, Homo sapiens
KFLSDLRRG

SEQ ID NO: 3632 - protein, 17 aa, Homo sapiens
RNDELNHLEEEGRFLKA

SEQ ID NO: 3633 - protein, 15 aa, Homo sapiens
RLVEIQFPAEHGWKE

SEQ ID NO: 3634 - protein, 17 aa, Homo sapiens
KVMNHITDGPRKDLVKG

SEQ ID NO: 3635 - protein, 18 aa, Homo sapiens
KVYSLLFADQLSYEVARQ

SEQ ID NO: 3636 - protein, 33 aa, Homo sapiens; identical to SEQ ID NO: 152

SEQ ID NO: 3637 - protein, 29 aa, Homo sapiens
KQILGQLDGGSVAVLPVVDSTNQYLLDRI

SEQ ID NO: 3638 - protein, 18 aa, Homo sapiens
RKQPPSDAALTMLSFIKS

SEQ ID NO: 3639 - protein, 20 aa, Homo sapiens
RQDHPGQMDRYLVYGDEYKA

SEQ ID NO: 3640 - protein, 13 aa, Homo sapiens
KALDKDQYLPRKL

SEQ ID NO: 3641 - protein, 23 aa, Homo sapiens
RGMEFVQGLSKPGRPHQWVFPKD

SEQ ID NO: 3642 - protein, 10 aa, Homo sapiens
KLQLPPLERL

SEQ ID NO: 3643 - protein, 34 aa, Homo sapiens; identical to SEQ ID NO: 40

SEQ ID NO: 3644 - protein, 25 aa, Homo sapiens
KTVNESHGSVERSSLTLATAINQRG

SEQ ID NO: 3645 - protein, 11 aa, Homo sapiens
RYLVYGDEYKA

SEQ ID NO: 3646 - protein, 14 aa, Homo sapiens
RDWGVDVFTVPGKG

SEQ ID NO: 3647 - protein, 14 aa, Homo sapiens
RVKWPNDLYLQDRK

SEQ ID NO: 3648 - protein, 14 aa, Homo sapiens
RHAIFTEITTFSRL

SEQ ID NO: 3649 - protein, 11 aa, Homo sapiens
KILSPPDISRF

SEQ ID NO: 3650 - protein, 12 aa, Homo sapiens
RDTLVSYMQTKE

SEQ ID NO: 3651 - protein, 16 aa, Homo sapiens
KHKNQFLDIWQLREKS

SEQ ID NO: 3652 - protein, 21 aa, Homo sapiens
RGLSQEGTGPPTSAGEGHSRT

SEQ ID NO: 3653 - protein, 19 aa, Homo sapiens
RYLVYGDEYKALRDAVAKA

SEQ ID NO: 3654 - protein, 20 aa, Homo sapiens
KVGFVGISNWALDPAKMNRG

SEQ ID NO: 3655 - protein, 16 aa, Homo sapiens
RFATSLVDNSVPLLRA

SEQ ID NO: 3656 - protein, 14 aa, Homo sapiens
RLHKEPFGEISSRY

SEQ ID NO: 3657 - protein, 11 aa, Homo sapiens
RLESAGLGYRV

SEQ ID NO: 3658 - protein, 26 aa, Homo sapiens
KLIALLANGEFHSGEQLGETLGMSRA

SEQ ID NO: 3659 - protein, 19 aa, Homo sapiens
RYLVYGDEYKALRDAVAKA

SEQ ID NO: 3660 - protein, 12 aa, Homo sapiens
KFLPEILALQRD

SEQ ID NO: 3661 - protein, 35 aa, Homo sapiens; identical to SEQ ID NO: 600

SEQ ID NO: 3662 - protein, 26 aa, Homo sapiens
RKLKAASEAPEEEVSLPWVHLAYQRF

SEQ ID NO: 3663 - protein, 15 aa, Homo sapiens
RAQDLFLDGVPLRKT

SEQ ID NO: 3664 - protein, 15 aa, Homo sapiens
RKPSPQDIAQAVLRN

SEQ ID NO: 3665 - protein, 16 aa, Homo sapiens
KMQLNVKNVPLKTIRL

SEQ ID NO: 3666 - protein, 22 aa, Homo sapiens
RAALELFEQEGLAPYLPRWEKL

SEQ ID NO: 3667 - protein, 20 aa, Homo sapiens
KTSAYSRNDELNHLEEEGRF

SEQ ID NO: 3668 - protein, 16 aa, Homo sapiens
KTLPTMNNLISQDKRI

SEQ ID NO: 3669 - protein, 15 aa, Homo sapiens
RKPSPQDIAQAVLRN

SEQ ID NO: 3670 - protein, 18 aa, Homo sapiens
KTPQSQQSAYFLLTLFRE

SEQ ID NO: 3671 - protein, 29 aa, Homo sapiens
RFQQGKDLQQYVSVVVLDEVGLAEDSPKM

SEQ ID NO: 3672 - protein, 13 aa, Homo sapiens
KFGIVLSAVITKS

SEQ ID NO: 3673 - protein, 14 aa, Homo sapiens
RDWGVDVFTVPGKG

SEQ ID NO: 3674 - protein, 12 aa, Homo sapiens
RGMEFVQGLSKP

SEQ ID NO: 3675 - protein, 25 aa, Homo sapiens
KQQGLRQDHPGQMDRYLVYGDEYKA

SEQ ID NO: 3676 - protein, 14 aa, Homo sapiens
RHAIFTEITTFSRL

SEQ ID NO: 3677 - protein, 16 aa, Homo sapiens
RTEDAAQELLLPESKG

SEQ ID NO: 3678 - protein, 15 aa, Homo sapiens
KVHGGTTADMIYSRV

SEQ ID NO: 3679 - protein, 23 aa, Homo sapiens
KTSAYSRNDELNHLEEEGRFLKA

SEQ ID NO: 3680 - protein, 13 aa, Homo sapiens
RLLQEQHQLSSRR

SEQ ID NO: 3681 - protein, 10 aa, Homo sapiens
RIIMEQSMRC

SEQ ID NO: 3682 - protein, 24 aa, Homo sapiens
KILIFQTDFEDGIRSAQLIASAKY

SEQ ID NO: 3683 - protein, 12 aa, Homo sapiens
RVPILWHFLQKE

SEQ ID NO: 3684 - protein, 13 aa, Homo sapiens
RLHNEIVYAVEKL

SEQ ID NO: 3685 - protein, 17 aa, Homo sapiens
KQPPSDAALTMLSFIKS

SEQ ID NO: 3686 - protein, 17 aa, Homo sapiens
KKQEESQFHPLEWLARE

SEQ ID NO: 3687 - protein, 15 aa, Homo sapiens
RVKWPNDLYLQDRKL

SEQ ID NO: 3688 - protein, 14 aa, Homo sapiens
RYLVYGDEYKALRD

SEQ ID NO: 3689 - protein, 22 aa, Homo sapiens
RNNWEKEIAAVISPELEHLDKT

SEQ ID NO: 3690 - protein, 13 aa, Homo sapiens
RLHNEIVYAVEKL

SEQ ID NO: 3691 - protein, 20 aa, Homo sapiens
KHIQTLRDWGVDVFTVPGKG

SEQ ID NO: 3692 - protein, 13 aa, Homo sapiens
RLLNFDTELSTKE

SEQ ID NO: 3693 - protein, 15 aa, Homo sapiens
RKPSPQDIAQAVLRN

SEQ ID NO: 3694 - protein, 14 aa, Homo sapiens
RHAIFTEITTFSRL

SEQ ID NO: 3695 - protein, 12 aa, Homo sapiens
KRQDKEFFGLRD

SEQ ID NO: 3696 - protein, 14 aa, Homo sapiens
RMKQPPATTPPFKT

SEQ ID NO: 3697 - protein, 10 aa, Homo sapiens
RFRPQWSLRD

SEQ ID NO: 3698 - protein, 11 aa, Homo sapiens
RLESAGLGYRV

SEQ ID NO: 3699 - protein, 25 aa, Homo sapiens
RLVEIQFPAEHGWKESLLGDMEWRL

SEQ ID NO: 3700 - protein, 16 aa, Homo sapiens
KQFQNVQQVEYSSIRG

SEQ ID NO: 3701 - protein, 17 aa, Homo sapiens
RVPILWHFLQKEAELRL

SEQ ID NO: 3702 - protein, 10 aa, Homo sapiens
REELLLLKKE

SEQ ID NO: 3703 - protein, 22 aa, Homo sapiens
KVGKETSELGGSDVSILDTTRL

SEQ ID NO: 3704 - protein, 20 aa, Homo sapiens
RFFPKPYDDSRLLLDEITRA

SEQ ID NO: 3705 - protein, 16 aa, Homo sapiens
KGYSLPEPIPLLNAKQ

SEQ ID NO: 3706 - protein, 22 aa, Homo sapiens
RLLLDEITRAQDLFLDGVPLRK

SEQ ID NO: 3707 - protein, 15 aa, Homo sapiens
KILIFQTDFEDGIRS

SEQ ID NO: 3708 - protein, 14 aa, Homo sapiens
KHKNQFLDIWQLRE

SEQ ID NO: 3709 - protein, 10 aa, Homo sapiens
RLLLDEITRA

SEQ ID NO: 3710 - protein, 16 aa, Homo sapiens
KTKDEMAAAEEKVGKN

SEQ ID NO: 3711 - protein, 15 aa, Homo sapiens
KHLIQVDFGVLAVRH

SEQ ID NO: 3712 - protein, 27 aa, Homo sapiens
RLIDPQVDESRVLGALLPFLDAQYQKV

SEQ ID NO: 3713 - protein, 16 aa, Homo sapiens
KTLPTMNNLISQDKRI

SEQ ID NO: 3714 - protein, 29 aa, Homo sapiens
RGIDKQGALLLEQDGVIKPWMGGEISLRS

SEQ ID NO: 3715 - protein, 21 aa, Homo sapiens
KMLGHSADETIGVVHLVLRRL

SEQ ID NO: 3716 - protein, 15 aa, Homo sapiens
KILIFQTDFEDGIRS

SEQ ID NO: 3717 - protein, 33 aa, Homo sapiens; identical to SEQ ID NO: 152

SEQ ID NO: 3718 - protein, 16 aa, Homo sapiens
KTLPTMNNLISQDKRI

SEQ ID NO: 3719 - protein, 35 aa, Homo sapiens; identical to SEQ ID NO: 600

SEQ ID NO: 3720 - protein, 11 aa, Homo sapiens
KRYLWQHLKKH

SEQ ID NO: 3721 - protein, 29 aa, Homo sapiens
KQILGQLDGGSVAVLPVVDSTNQYLLDRI

SEQ ID NO: 3722 - protein, 12 aa, Homo sapiens
KLDNFINRPVKL

SEQ ID NO: 3723 - protein, 13 aa, Homo sapiens
KLKNPQTQTEERF

SEQ ID NO: 3724 - protein, 19 aa, Homo sapiens
RNLEWLKTVNESHGSVERS

SEQ ID NO: 3725 - protein, 20 aa, Homo sapiens
KTIVADAMQGPAAYSDLFRS

SEQ ID NO: 3726 - protein, 17 aa, Homo sapiens
KQPPSDAALTMLSFIKS

SEQ ID NO: 3727 - protein, 22 aa, Homo sapiens
KHMVTMDGVREEDLAPFSLRKR

SEQ ID NO: 3728 - protein, 16 aa, Homo sapiens
RETLDQINQELIQAKK

SEQ ID NO: 3729 - protein, 24 aa, Homo sapiens
KDAWRQPEDTWAALEGLSFSPFRE

SEQ ID NO: 3730 - protein, 21 aa, Homo sapiens
RGLSQEGTGPPTSAGEGHSRT

SEQ ID NO: 3731 - protein, 26 aa, Homo sapiens
RKLKAASEAPEEEVSLPWVHLAYQRF

SEQ ID NO: 3732 - protein, 13 aa, Homo sapiens
RLIAVADSVLTKV

SEQ ID NO: 3733 - protein, 18 aa, Homo sapiens
KVYSLLFADQLSYEVARQ

SEQ ID NO: 3734 - protein, 56 aa, Homo sapiens; identical to SEQ ID NO: 22

SEQ ID NO: 3735 - protein, 9 aa, Homo sapiens
REVAILYRS

SEQ ID NO: 3736 - protein, 24 aa, Homo sapiens
RNFSGKDDIQALDIFLANLPEAKC

SEQ ID NO: 3737 - protein, 16 aa, Homo sapiens
KTLPTMNNLISQDKRI

SEQ ID NO: 3738 - protein, 20 aa, Homo sapiens
RFRPQWSLRDTLVSYMQTKE

SEQ ID NO: 3739 - protein, 16 aa, Homo sapiens
KGYSLPEPIPLLNAKQ

SEQ ID NO: 3740 - protein, 18 aa, Homo sapiens
RATHYHLSSQVQEMAGKI

SEQ ID NO: 3741 - protein, 23 aa, Homo sapiens
KTSAYSRNDELNHLEEEGRFLKA

SEQ ID NO: 3742 - protein, 16 aa, Homo sapiens
RTRVPQFSFLDIFPKV

SEQ ID NO: 3743 - protein, 15 aa, Homo sapiens
RLVESISLDENGTRV

SEQ ID NO: 3744 - protein, 22 aa, Homo sapiens
KHMVTMDGVREEDLAPFSLRKR

SEQ ID NO: 3745 - protein, 14 aa, Homo sapiens
RSAEKLQLPPLERL

SEQ ID NO: 3746 - protein, 13 aa, Homo sapiens
KFGIVLSAVITKS

SEQ ID NO: 3747 - protein, 14 aa, Homo sapiens
RSSLTLATAINQRG

SEQ ID NO: 3748 - protein, 24 aa, Homo sapiens
KDLQQYVSVVVLDEVGLAEDSPKM

SEQ ID NO: 3749 - protein, 14 aa, Homo sapiens
RVPQFSFLDIFPKV

SEQ ID NO: 3750 - protein, 15 aa, Homo sapiens
KVHGGTTADMIYSRV

SEQ ID NO: 3751 - protein, 16 aa, Homo sapiens
RTRVPQFSFLDIFPKV

SEQ ID NO: 3752 - protein, 20 aa, Homo sapiens
RFFPKPYDDSRLLLDEITRA

SEQ ID NO: 3753 - protein, 15 aa, Homo sapiens
KVHGGTTADMIYSRV

SEQ ID NO: 3754 - protein, 14 aa, Homo sapiens
RSAEKLQLPPLERL

SEQ ID NO: 3755 - protein, 15 aa, Homo sapiens
RLVESISLDENGTRV

SEQ ID NO: 3756 - protein, 13 aa, Homo sapiens
RRSTLMVSDVTRL

SEQ ID NO: 3757 - protein, 20 aa, Homo sapiens
RAADFLSEPEGGPEMAKEKQ

SEQ ID NO: 3758 - protein, 18 aa, Homo sapiens
RATHYHLSSQVQEMAGKI

SEQ ID NO: 3759 - protein, 14 aa, Homo sapiens
RRLLNFDTELSTKE

SEQ ID NO: 3760 - protein, 15 aa, Homo sapiens
RWEKLDNFINRPVKL

SEQ ID NO: 3761 - protein, 12 aa, Homo sapiens
RITVFLSTWNKL

SEQ ID NO: 3762 - protein, 19 aa, Homo sapiens
KASNRKPSPQDIAQAVLRN

SEQ ID NO: 3763 - protein, 13 aa, Homo sapiens
KLKNPQTQTEERF

SEQ ID NO: 3764 - protein, 12 aa, Homo sapiens
KWPNDLYLQDRK

SEQ ID NO: 3765 - protein, 18 aa, Homo sapiens
RQDKEFFGLRDYYSLIKM

SEQ ID NO: 3766 - protein, 20 aa, Homo sapiens
RQDHPGQMDRYLVYGDEYKA

SEQ ID NO: 3767 - protein, 10 aa, Homo sapiens
KLQLPPLERL

SEQ ID NO: 3768 - protein, 9 aa, Homo sapiens
KILAIEMRF

SEQ ID NO: 3769 - protein, 23 aa, Homo sapiens
RLLLDEITRAQDLFLDGVPLRKT

SEQ ID NO: 3770 - protein, 15 aa, Homo sapiens
RKPSPQDIAQAVLRN

SEQ ID NO: 3771 - protein, 16 aa, Homo sapiens
RFATSLVDNSVPLLRA

SEQ ID NO: 3772 - protein, 13 aa, Homo sapiens
RAAINKHIQTLRD

SEQ ID NO: 3773 - protein, 29 aa, Homo sapiens
RFQQGKDLQQYVSVVVLDEVGLAEDSPKM

SEQ ID NO: 3774 - protein, 12 aa, Homo sapiens
KTHGPFEAVMRT

SEQ ID NO: 3775 - protein, 37 aa, Homo sapiens; identical to SEQ ID NO: 408

SEQ ID NO: 3776 - protein, 12 aa, Homo sapiens
KALDKDQYLPRK

SEQ ID NO: 3777 - protein, 15 aa, Homo sapiens
RGIYVIQAPKGGQKI

SEQ ID NO: 3778 - protein, 17 aa, Homo sapiens
RVPKQTLSAAAVFNDRL

SEQ ID NO: 3779 - protein, 18 aa, Homo sapiens
KKVGFVGISNWALDPAKM

SEQ ID NO: 3780 - protein, 20 aa, Homo sapiens
RGREPANEASVEYLQEVARI

SEQ ID NO: 3781 - protein, 17 aa, Homo sapiens
KQPPSDAALTMLSFIKS

SEQ ID NO: 3782 - protein, 14 aa, Homo sapiens
RHAIFTEITTFSRL

SEQ ID NO: 3783 - protein, 16 aa, Homo sapiens
KGYSLPEPIPLLNAKQ

SEQ ID NO: 3784 - protein, 14 aa, Homo sapiens
RMKQPPATTPPFKT

SEQ ID NO: 3785 - protein, 19 aa, Homo sapiens
RYLVYGDEYKALRDAVAKA

SEQ ID NO: 3786 - protein, 23 aa, Homo sapiens
RLSVFLKKQEESQFHPLEWLARE

SEQ ID NO: 3787 - protein, 15 aa, Homo sapiens
RVKWPNDLYLQDRKL

SEQ ID NO: 3788 - protein, 9 aa, Homo sapiens
RFLNYQLRD

SEQ ID NO: 3789 - protein, 16 aa, Homo sapiens
RTRVPQFSFLDIFPKV

SEQ ID NO: 3790 - protein, 25 aa, Homo sapiens
RLVEIQFPAEHGWKESLLGDMEWRL

SEQ ID NO: 3791 - protein, 37 aa, Homo sapiens; identical to SEQ ID NO: 408

SEQ ID NO: 3792 - protein, 23 aa, Homo sapiens
RLLLDEITRAQDLFLDGVPLRKT

SEQ ID NO: 3793 - protein, 24 aa, Homo sapiens
KDLQQYVSVVVLDEVGLAEDSPKM

SEQ ID NO: 3794 - protein, 15 aa, Homo sapiens
KLIIGDKEIFGISRG

SEQ ID NO: 3795 - protein, 31 aa, Homo sapiens; identical to SEQ ID NO: 957

SEQ ID NO: 3796 - protein, 20 aa, Homo sapiens
RFFPKPYDDSRLLLDEITRA

SEQ ID NO: 3797 - protein, 14 aa, Homo sapiens
RVPQFSFLDIFPKV

SEQ ID NO: 3798 - protein, 14 aa, Homo sapiens
RLHKEPFGEISSRY

SEQ ID NO: 3799 - protein, 11 aa, Homo sapiens
RGIYVIQAPKG

SEQ ID NO: 3800 - protein, 17 aa, Homo sapiens
KQPPSDAALTMLSFIKS

SEQ ID NO: 3801 - protein, 14 aa, Homo sapiens
RSAEKLQLPPLERL

SEQ ID NO: 3802 - protein, 23 aa, Homo sapiens
RQDHPGQMDRYLVYGDEYKALRD

SEQ ID NO: 3803 - protein, 33 aa, Homo sapiens; identical to SEQ ID NO: 152

SEQ ID NO: 3804 - protein, 14 aa, Homo sapiens
RRLLNFDTELSTKE

SEQ ID NO: 3805 - protein, 25 aa, Homo sapiens
RAAINKHIQTLRDWGVDVFTVPGKG

SEQ ID NO: 3806 - protein, 16 aa, Homo sapiens
RFATSLVDNSVPLLRA

SEQ ID NO: 3807 - protein, 15 aa, Homo sapiens
KVHGGTTADMIYSRV

SEQ ID NO: 3808 - protein, 14 aa, Homo sapiens
RVREAENVAFANKD

SEQ ID NO: 3809 - protein, 13 aa, Homo sapiens
KILANVTEDAKRL

SEQ ID NO: 3810 - protein, 33 aa, Homo sapiens; identical to SEQ ID NO: 19

SEQ ID NO: 3811 - protein, 16 aa, Homo sapiens
RTRVPQFSFLDIFPKV

SEQ ID NO: 3812 - protein, 59 aa, Homo sapiens; identical to SEQ ID NO: 88

SEQ ID NO: 3813 - protein, 12 aa, Homo sapiens
REEDLAPFSLRK

SEQ ID NO: 3814 - protein, 15 aa, Homo sapiens
KIPLFLVGKPGSSKS

SEQ ID NO: 3815 - protein, 21 aa, Homo sapiens
KSGEVTLAEIDVIFKDFVNKY

SEQ ID NO: 3816 - protein, 14 aa, Homo sapiens
RRLLNFDTELSTKE

SEQ ID NO: 3817 - protein, 59 aa, Homo sapiens; identical to SEQ ID NO: 88

SEQ ID NO: 3818 - protein, 11 aa, Homo sapiens
RGIYVIQAPKG

SEQ ID NO: 3819 - protein, 11 aa, Homo sapiens
RYLVYGDEYKA

SEQ ID NO: 3820 - protein, 14 aa, Homo sapiens
KQHLLSIDEPLFRS

SEQ ID NO: 3821 - protein, 21 aa, Homo sapiens
KHMVTMDGVREEDLAPFSLRK

SEQ ID NO: 3822 - protein, 17 aa, Homo sapiens
RALTEELHQKVSEEAKS

SEQ ID NO: 3823 - protein, 13 aa, Homo sapiens
RLLNFDTELSTKE

SEQ ID NO: 3824 - protein, 11 aa, Homo sapiens
RYLVYGDEYKA

SEQ ID NO: 3825 - protein, 14 aa, Homo sapiens
RMKQPPATTPPFKT

SEQ ID NO: 3826 - protein, 23 aa, Homo sapiens
RQRHNSFADFLQAHLHTADLERH

SEQ ID NO: 3827 - protein, 14 aa, Homo sapiens
RYLVYGDEYKALRD

SEQ ID NO: 3828 - protein, 15 aa, Homo sapiens
RLVESISLDENGTRV

SEQ ID NO: 3829 - protein, 14 aa, Homo sapiens
RMKQPPATTPPFKT

SEQ ID NO: 3830 - protein, 14 aa, Homo sapiens
RVPQFSFLDIFPKV

SEQ ID NO: 3831 - protein, 21 aa, Homo sapiens
RHNSFADFLQAHLHTADLERH

SEQ ID NO: 3832 - protein, 24 aa, Homo sapiens
KDAWRQPEDTWAALEGLSFSPFRE

SEQ ID NO: 3833 - protein, 14 aa, Homo sapiens
RLGSIPLRQLVYRV

SEQ ID NO: 3834 - protein, 29 aa, Homo sapiens
KQILGQLDGGSVAVLPVVDSTNQYLLDRI

SEQ ID NO: 3835 - protein, 10 aa, Homo sapiens
RLLLDEITRA

SEQ ID NO: 3836 - protein, 14 aa, Homo sapiens
RHAIFTEITTFSRL

SEQ ID NO: 3837 - protein, 14 aa, Homo sapiens
RVPQFSFLDIFPKV

SEQ ID NO: 3838 - protein, 23 aa, Homo sapiens
KTSAYSRNDELNHLEEEGRFLKA

SEQ ID NO: 3839 - protein, 12 aa, Homo sapiens
KNQEADVQEVKA

SEQ ID NO: 3840 - protein, 13 aa, Homo sapiens
KALDKDQYLPRKL

SEQ ID NO: 3841 - protein, 13 aa, Homo sapiens
RLLNFDTELSTKE

SEQ ID NO: 3842 - protein, 17 aa, Homo sapiens
KKQEESQFHPLEWLARE

SEQ ID NO: 3843 - protein, 27 aa, Homo sapiens
RLIDPQVDESRVLGALLPFLDAQYQKV

SEQ ID NO: 3844 - protein, 23 aa, Homo sapiens
RQDHPGQMDRYLVYGDEYKALRD

SEQ ID NO: 3845 - protein, 11 aa, Homo sapiens
RYLVYGDEYKA

SEQ ID NO: 3846 - protein, 59 aa, Homo sapiens; identical to SEQ ID NO: 88

SEQ ID NO: 3847 - protein, 25 aa, Homo sapiens
KSSLLGSGDWHQYYDIVYMKPHGRL

SEQ ID NO: 3848 - protein, 30 aa, Homo sapiens
KSGEVTLAEIDVIFKDFVNKYTDLDSELKI

SEQ ID NO: 3849 - protein, 20 aa, Homo sapiens
RDLVKQFQNVQQVEYSSIRG

SEQ ID NO: 3850 - protein, 26 aa, Homo sapiens
KLIALLANGEFHSGEQLGETLGMSRA

SEQ ID NO: 3851 - protein, 29 aa, Homo sapiens
RGIDKQGALLLEQDGVIKPWMGGEISLRS

SEQ ID NO: 3852 - protein, 12 aa, Homo sapiens
RDSHIFQLFWRE

SEQ ID NO: 3853 - protein, 34 aa, Homo sapiens; identical to SEQ ID NO: 40

SEQ ID NO: 3854 - protein, 16 aa, Homo sapiens
KGYSLPEPIPLLNAKQ

SEQ ID NO: 3855 - protein, 14 aa, Homo sapiens
RSAEKLQLPPLERL

SEQ ID NO: 3856 - protein, 13 aa, Homo sapiens
RLHNEIVYAVEKL

SEQ ID NO: 3857 - protein, 12 aa, Homo sapiens
RFFPKPYDDSRL

SEQ ID NO: 3858 - protein, 18 aa, Homo sapiens
RENSDVKTHGPFEAVMRT

SEQ ID NO: 3859 - protein, 16 aa, Homo sapiens
RLLNFDTELSTKEMRN

SEQ ID NO: 3860 - protein, 23 aa, Homo sapiens
KTSAYSRNDELNHLEEEGRFLKA

SEQ ID NO: 3861 - protein, 11 aa, Homo sapiens
RYLVYGDEYKA

SEQ ID NO: 3862 - protein, 18 aa, Homo sapiens
KADRTQTGHVLGNPQRRD

SEQ ID NO: 3863 - protein, 37 aa, Homo sapiens; identical to SEQ ID NO: 408

SEQ ID NO: 3864 - protein, 15 aa, Homo sapiens
RKPSPQDIAQAVLRN

SEQ ID NO: 3865 - protein, 12 aa, Homo sapiens
RFLKAYSPASRG

SEQ ID NO: 3866 - protein, 21 aa, Homo sapiens
KQFQNVQQVEYSSIRGFLSKH

SEQ ID NO: 3867 - protein, 17 aa, Homo sapiens
RHDWNYEHLFMDIKNKM

SEQ ID NO: 3868 - protein, 18 aa, Homo sapiens
RATHYHLSSQVQEMAGKI

SEQ ID NO: 3869 - protein, 15 aa, Homo sapiens
KHLIQVDFGVLAVRH

SEQ ID NO: 3870 - protein, 19 aa, Homo sapiens
RNLEWLKTVNESHGSVERS

SEQ ID NO: 3871 - protein, 14 aa, Homo sapiens
KNQFLDIWQLREKS

SEQ ID NO: 3872 - protein, 13 aa, Homo sapiens
RLLNFDTELSTKE

SEQ ID NO: 3873 - protein, 12 aa, Homo sapiens
KFLPEILALQRD

SEQ ID NO: 3874 - protein, 16 aa, Homo sapiens
RLLNFDTELSTKEMRN

SEQ ID NO: 3875 - protein, 13 aa, Homo sapiens
RLLNFDTELSTKE

SEQ ID NO: 3876 - protein, 14 aa, Homo sapiens
KRLIAVADSVLTKV

SEQ ID NO: 3877 - protein, 18 aa, Homo sapiens
KIIYGDPVTFLPHLPRKS

SEQ ID NO: 3878 - protein, 16 aa, Homo sapiens
KQFQNVQQVEYSSIRG

SEQ ID NO: 3879 - protein, 23 aa, Homo sapiens
RQRHNSFADFLQAHLHTADLERH

SEQ ID NO: 3880 - protein, 17 aa, Homo sapiens
RALTEELHQKVSEEAKS

SEQ ID NO: 3881 - protein, 17 aa, Homo sapiens
RALTEELHQKVSEEAKS

SEQ ID NO: 3882 - protein, 9 aa, Homo sapiens
RYLWQHLKK

SEQ ID NO: 3883 - protein, 12 aa, Homo sapiens
REALGGINELKV

SEQ ID NO: 3884 - protein, 12 aa, Homo sapiens
REALGGINELKV

SEQ ID NO: 3885 - protein, 14 aa, Homo sapiens
RRLLNFDTELSTKE

SEQ ID NO: 3886 - protein, 14 aa, Homo sapiens
RLHKEPFGEISSRY

SEQ ID NO: 3887 - protein, 29 aa, Homo sapiens
RGIDKQGALLLEQDGVIKPWMGGEISLRS

SEQ ID NO: 3888 - protein, 25 aa, Homo sapiens
KLDNFINRPVKLIIGDKEIFGISRG

SEQ ID NO: 3889 - protein, 12 aa, Homo sapiens
RVQGYFASFAKA

SEQ ID NO: 3890 - protein, 23 aa, Homo sapiens
RQRHNSFADFLQAHLHTADLERH

SEQ ID NO: 3891 - protein, 16 aa, Homo sapiens
KGYSLPEPIPLLNAKQ

SEQ ID NO: 3892 - protein, 20 aa, Homo sapiens
RDLVKQFQNVQQVEYSSIRG

SEQ ID NO: 3893 - protein, 20 aa, Homo sapiens
RVQGAVTPLLASMISFIDRD

SEQ ID NO: 3894 - protein, 13 aa, Homo sapiens
KTVNESHGSVERS

SEQ ID NO: 3895 - protein, 16 aa, Homo sapiens
RFATSLVDNSVPLLRA

SEQ ID NO: 3896 - protein, 17 aa, Homo sapiens
KQPPSDAALTMLSFIKS

SEQ ID NO: 3897 - protein, 23 aa, Homo sapiens
RLSVFLKKQEESQFHPLEWLARE

SEQ ID NO: 3898 - protein, 25 aa, Homo sapiens
RLVEIQFPAEHGWKESLLGDMEWRL

SEQ ID NO: 3899 - protein, 16 aa, Homo sapiens
RTRVPQFSFLDIFPKV

SEQ ID NO: 3900 - protein, 19 aa, Homo sapiens
RAALELFEQEGLAPYLPRW

SEQ ID NO: 3901 - protein, 16 aa, Homo sapiens
RTRVPQFSFLDIFPKV

SEQ ID NO: 3902 - protein, 15 aa, Homo sapiens
KVHGGTTADMIYSRV

SEQ ID NO: 3903 - protein, 20 aa, Homo sapiens
RGREPANEASVEYLQEVARI

SEQ ID NO: 3904 - protein, 9 aa, Homo sapiens
REELLLLKK

SEQ ID NO: 3905 - protein, 17 aa, Homo sapiens
KQPPSDAALTMLSFIKS

SEQ ID NO: 3906 - protein, 14 aa, Homo sapiens
RVPQFSFLDIFPKV

SEQ ID NO: 3907 - protein, 13 aa, Homo sapiens
RLLQEQHQLSSRR

SEQ ID NO: 3908 - protein, 12 aa, Homo sapiens
RDTLVSYMQTKE

SEQ ID NO: 3909 - protein, 11 aa, Homo sapiens
KHVVPLPDGKS

SEQ ID NO: 3910 - protein, 12 aa, Homo sapiens
KLDNFINRPVKL

SEQ ID NO: 3911 - protein, 35 aa, Homo sapiens; identical to SEQ ID NO: 600

SEQ ID NO: 3912 - protein, 22 aa, Homo sapiens
RAPKPTLLWLQQFDTEYSFLKE

SEQ ID NO: 3913 - protein, 56 aa, Homo sapiens; identical to SEQ ID NO: 22

SEQ ID NO: 3914 - protein, 14 aa, Homo sapiens
RSSLTLATAINQRG

SEQ ID NO: 3915 - protein, 24 aa, Homo sapiens
RNFSGKDDIQALDIFLANLPEAKC

SEQ ID NO: 3916 - protein, 9 aa, Homo sapiens
KILAIEMRF

SEQ ID NO: 3917 - protein, 21 aa, Homo sapiens
RGLSQEGTGPPTSAGEGHSRT

SEQ ID NO: 3918 - protein, 48 aa, Homo sapiens; identical to SEQ ID NO: 18

SEQ ID NO: 3919 - protein, 15 aa, Homo sapiens
KVHGGTTADMIYSRV

SEQ ID NO: 3920 - protein, 15 aa, Homo sapiens
KHTIALWQFLSAHKS

SEQ ID NO: 3921 - protein, 18 aa, Homo sapiens
KSLSPFNDVVDKTPVIRS

SEQ ID NO: 3922 - protein, 29 aa, Homo sapiens
RFQQGKDLQQYVSVVVLDEVGLAEDSPKM

SEQ ID NO: 3923 - protein, 11 aa, Homo sapiens
KYTDLDSELKI

SEQ ID NO: 3924 - protein, 13 aa, Homo sapiens
RLHNEIVYAVEKL

SEQ ID NO: 3925 - protein, 14 aa, Homo sapiens
RRLLNFDTELSTKE

SEQ ID NO: 3926 - protein, 15 aa, Homo sapiens
KVHGGTTADMIYSRV

SEQ ID NO: 3927 - protein, 18 aa, Homo sapiens
RENSDVKTHGPFEAVMRT

SEQ ID NO: 3928 - protein, 11 aa, Homo sapiens
KLYIQQIVQRL

SEQ ID NO: 3929 - protein, 12 aa, Homo sapiens
REEDLAPFSLRK

SEQ ID NO: 3930 - protein, 20 aa, Homo sapiens
RGREPANEASVEYLQEVARI

SEQ ID NO: 3931 - protein, 12 aa, Homo sapiens
KTHGPFEAVMRT

SEQ ID NO: 3932 - protein, 14 aa, Homo sapiens
RLSLKGIPTLVYRH

SEQ ID NO: 3933 - protein, 21 aa, Homo sapiens
RRVMEELPLMLLSEFSLVDKL

SEQ ID NO: 3934 - protein, 24 aa, Homo sapiens
KDLQQYVSVVVLDEVGLAEDSPKM

SEQ ID NO: 3935 - protein, 15 aa, Homo sapiens
KKFVDIFQQTPLGRF

SEQ ID NO: 3936 - protein, 12 aa, Homo sapiens
KFLPEILALQRD

SEQ ID NO: 3937 - protein, 16 aa, Homo sapiens
RTRVPQFSFLDIFPKV

SEQ ID NO: 3938 - protein, 30 aa, Homo sapiens; identical to SEQ ID NO: 1299

SEQ ID NO: 3939 - protein, 12 aa, Homo sapiens
KFLPEILALQRD

SEQ ID NO: 3940 - protein, 12 aa, Homo sapiens
KNQFLDIWQLRE

SEQ ID NO: 3941 - protein, 25 aa, Homo sapiens
KQQGLRQDHPGQMDRYLVYGDEYKA

SEQ ID NO: 3942 - protein, 17 aa, Homo sapiens
KVGFVGISNWALDPAKM

SEQ ID NO: 3943 - protein, 25 aa, Homo sapiens
KTVNESHGSVERSSLTLATAINQRG

SEQ ID NO: 3944 - protein, 18 aa, Homo sapiens
KGFLQQHILKDLEQLAKM

SEQ ID NO: 3945 - protein, 13 aa, Homo sapiens
KALDKDQYLPRKL

SEQ ID NO: 3946 - protein, 17 aa, Homo sapiens
RALTEELHQKVSEEAKS

SEQ ID NO: 3947 - protein, 19 aa, Homo sapiens
KETSELGGSDVSILDTTRL

SEQ ID NO: 3948 - protein, 18 aa, Homo sapiens
RAADFLSEPEGGPEMAKE

SEQ ID NO: 3949 - protein, 19 aa, Homo sapiens
RAALELFEQEGLAPYLPRW

SEQ ID NO: 3950 - protein, 14 aa, Homo sapiens
RVKWPNDLYLQDRK

SEQ ID NO: 3951 - protein, 16 aa, Homo sapiens
RTRVPQFSFLDIFPKV

SEQ ID NO: 3952 - protein, 19 aa, Homo sapiens
RYLVYGDEYKALRDAVAKA

SEQ ID NO: 3953 - protein, 12 aa, Homo sapiens
KALDKDQYLPRK

SEQ ID NO: 3954 - protein, 29 aa, Homo sapiens
RGIDKQGALLLEQDGVIKPWMGGEISLRS

SEQ ID NO: 3955 - protein, 13 aa, Homo sapiens
KILANVTEDAKRL

SEQ ID NO: 3956 - protein, 29 aa, Homo sapiens
RGIDKQGALLLEQDGVIKPWMGGEISLRS

SEQ ID NO: 3957 - protein, 15 aa, Homo sapiens
KVHGGTTADMIYSRV

SEQ ID NO: 3958 - protein, 15 aa, Homo sapiens
RGSPNETELIESAKG

SEQ ID NO: 3959 - protein, 12 aa, Homo sapiens
KALDKDQYLPRK

SEQ ID NO: 3960 - protein, 15 aa, Homo sapiens
RWEKLDNFINRPVKL

SEQ ID NO: 3961 - protein, 14 aa, Homo sapiens
RLSLKGIPTLVYRH

SEQ ID NO: 3962 - protein, 13 aa, Homo sapiens
RYKADLSPENAKL

SEQ ID NO: 3963 - protein, 10 aa, Homo sapiens
RYLWQHLKKH

SEQ ID NO: 3964 - protein, 20 aa, Homo sapiens
RQPEDTWAALEGLSFSPFRE

SEQ ID NO: 3965 - protein, 20 aa, Homo sapiens
KMLGHSADETIGVVHLVLRR

SEQ ID NO: 3966 - protein, 12 aa, Homo sapiens
RDLYQGLLLQRV

SEQ ID NO: 3967 - protein, 16 aa, Homo sapiens
KQEESQFHPLEWLARE

SEQ ID NO: 3968 - protein, 15 aa, Homo sapiens
KHLIQVDFGVLAVRH

SEQ ID NO: 3969 - protein, 16 aa, Homo sapiens
RTRVPQFSFLDIFPKV

SEQ ID NO: 3970 - protein, 59 aa, Homo sapiens; identical to SEQ ID NO: 88

SEQ ID NO: 3971 - protein, 21 aa, Homo sapiens
RHNSFADFLQAHLHTADLERH

SEQ ID NO: 3972 - protein, 14 aa, Homo sapiens
RSAEKLQLPPLERL

SEQ ID NO: 3973 - protein, 23 aa, Homo sapiens
RLSAYSLGGFAAEWLSQEYFHRQ

SEQ ID NO: 3974 - protein, 29 aa, Homo sapiens
RGIDKQGALLLEQDGVIKPWMGGEISLRS

SEQ ID NO: 3975 - protein, 12 aa, Homo sapiens
RLIKFLSDLRRG

SEQ ID NO: 3976 - protein, 13 aa, Homo sapiens
RLLNFDTELSTKE

SEQ ID NO: 3977 - protein, 15 aa, Homo sapiens
KILIFQTDFEDGIRS

SEQ ID NO: 3978 - protein, 16 aa, Homo sapiens
RTEDAAQELLLPESKG

SEQ ID NO: 3979 - protein, 13 aa, Homo sapiens
RLLNFDTELSTKE

SEQ ID NO: 3980 - protein, 22 aa, Homo sapiens
KDRVEQIKEYHHLHQAVHAAKV

SEQ ID NO: 3981 - protein, 14 aa, Homo sapiens
RNDELNHLEEEGRF

SEQ ID NO: 3982 - protein, 15 aa, Homo sapiens
RGIYVIQAPKGGQKI

SEQ ID NO: 3983 - protein, 17 aa, Homo sapiens
KVGFVGISNWALDPAKM

SEQ ID NO: 3984 - protein, 14 aa, Homo sapiens
RHAIFTEITTFSRL

SEQ ID NO: 3985 - protein, 23 aa, Homo sapiens
KDNAPPEKEVIESLLSLLFVQKG

SEQ ID NO: 3986 - protein, 35 aa, Homo sapiens; identical to SEQ ID NO: 600

SEQ ID NO: 3987 - protein, 14 aa, Homo sapiens
RRLLNFDTELSTKE

SEQ ID NO: 3988 - protein, 11 aa, Homo sapiens
KLLQDISEARC

SEQ ID NO: 3989 - protein, 13 aa, Homo sapiens
REEDLAPFSLRKR

SEQ ID NO: 3990 - protein, 12 aa, Homo sapiens
KTHGPFEAVMRT

SEQ ID NO: 3991 - protein, 18 aa, Homo sapiens
RILTIYPQVLHSLMEARW

SEQ ID NO: 3992 - protein, 15 aa, Homo sapiens
KLIIGDKEIFGISRG

SEQ ID NO: 3993 - protein, 20 aa, Homo sapiens
RQDHPGQMDRYLVYGDEYKA

SEQ ID NO: 3994 - protein, 21 aa, Homo sapiens
RRVMEELPLMLLSEFSLVDKL

SEQ ID NO: 3995 - protein, 11 aa, Homo sapiens
RLESAGLGYRV

SEQ ID NO: 3996 - protein, 13 aa, Homo sapiens
KFGIVLSAVITKS

SEQ ID NO: 3997 - protein, 18 aa, Homo sapiens
KSLSPFNDVVDKTPVIRS

SEQ ID NO: 3998 - protein, 20 aa, Homo sapiens
RFFPKPYDDSRLLLDEITRA

SEQ ID NO: 3999 - protein, 26 aa, Homo sapiens
KLIALLANGEFHSGEQLGETLGMSRA

SEQ ID NO: 4000 - protein, 25 aa, Homo sapiens
KSSLLGSGDWHQYYDIVYMKPHGRL

SEQ ID NO: 4001 - protein, 11 aa, Homo sapiens
RLESAGLGYRV

SEQ ID NO: 4002 - protein, 14 aa, Homo sapiens
RYLVYGDEYKALRD

SEQ ID NO: 4003 - protein, 24 aa, Homo sapiens
RNFSGKDDIQALDIFLANLPEAKC

SEQ ID NO: 4004 - protein, 15 aa, Homo sapiens
RLVESISLDENGTRV

SEQ ID NO: 4005 - protein, 24 aa, Homo sapiens
RNFSGKDDIQALDIFLANLPEAKC

SEQ ID NO: 4006 - protein, 12 aa, Homo sapiens
RFFPKPYDDSRL

SEQ ID NO: 4007 - protein, 18 aa, Homo sapiens
KSLSPFNDVVDKTPVIRS

SEQ ID NO: 4008 - protein, 17 aa, Homo sapiens
KVMNHITDGPRKDLVKG

SEQ ID NO: 4009 - protein, 13 aa, Homo sapiens
RLLNFDTELSTKE

SEQ ID NO: 4010 - protein, 36 aa, Homo sapiens; identical to SEQ ID NO: 745

SEQ ID NO: 4011 - protein, 19 aa, Homo sapiens
RVPELQGLVTEHVFLLDKC

SEQ ID NO: 4012 - protein, 16 aa, Homo sapiens
KGYSLPEPIPLLNAKQ

SEQ ID NO: 4013 - protein, 37 aa, Homo sapiens; identical to SEQ ID NO: 408

SEQ ID NO: 4014 - protein, 17 aa, Homo sapiens
RALTEELHQKVSEEAKS

SEQ ID NO: 4015 - protein, 19 aa, Homo sapiens
KDDIQALDIFLANLPEAKC

SEQ ID NO: 4016 - protein, 14 aa, Homo sapiens
RVPFNVDFDKLPRH

SEQ ID NO: 4017 - protein, 25 aa, Homo sapiens
KVGKETSELGGSDVSILDTTRLLRS

SEQ ID NO: 4018 - protein, 17 aa, Homo sapiens
KVGFVGISNWALDPAKM

SEQ ID NO: 4019 - protein, 15 aa, Homo sapiens
KILIFQTDFEDGIRS

SEQ ID NO: 4020 - protein, 13 aa, Homo sapiens
RRSTLMVSDVTRL

SEQ ID NO: 4021 - protein, 15 aa, Homo sapiens
RVKWPNDLYLQDRKL

SEQ ID NO: 4022 - protein, 20 aa, Homo sapiens
RFFPKPYDDSRLLLDEITRA

SEQ ID NO: 4023 - protein, 24 aa, Homo sapiens
RNFSGKDDIQALDIFLANLPEAKC

SEQ ID NO: 4024 - protein, 14 aa, Homo sapiens
RRLLNFDTELSTKE

SEQ ID NO: 4025 - protein, 17 aa, Homo sapiens
RNDELNHLEEEGRFLKA

SEQ ID NO: 4026 - protein, 25 aa, Homo sapiens
KLDNFINRPVKLIIGDKEIFGISRG

SEQ ID NO: 4027 - protein, 25 aa, Homo sapiens
KSSLLGSGDWHQYYDIVYMKPHGRL

SEQ ID NO: 4028 - protein, 34 aa, Homo sapiens; identical to SEQ ID NO: 40

SEQ ID NO: 4029 - protein, 10 aa, Homo sapiens
RIIMEQSMRC

SEQ ID NO: 4030 - protein, 20 aa, Homo sapiens
RGREPANEASVEYLQEVARI

SEQ ID NO: 4031 - protein, 12 aa, Homo sapiens
RSTLMVSDVTRL

SEQ ID NO: 4032 - protein, 12 aa, Homo sapiens
KILANVTEDAKR

SEQ ID NO: 4033 - protein, 11 aa, Homo sapiens
KASWTVQESKK

SEQ ID NO: 4034 - protein, 15 aa, Homo sapiens
RDLSHILGIPQSWRL

SEQ ID NO: 4035 - protein, 60 aa, Homo sapiens; identical to SEQ ID NO: 24

SEQ ID NO: 4036 - protein, 48 aa, Homo sapiens
KPIPNPLLGLDSTASKDNTVPLKLIALLANGEFHSGEQLGETLGMSRA

SEQ ID NO: 4037 - protein, 19 aa, Homo sapiens
RYLVYGDEYKALRDAVAKA

SEQ ID NO: 4038 - protein, 26 aa, Homo sapiens
KIKDYLEELWVQAQYITDAEGLPKKF

SEQ ID NO: 4039 - protein, 15 aa, Homo sapiens
REYSLEEVKELLNKL

SEQ ID NO: 4040 - protein, 17 aa, Homo sapiens
KVGFVGISNWALDPAKM

SEQ ID NO: 4041 - protein, 14 aa, Homo sapiens
RLHKEPFGEISSRY

SEQ ID NO: 4042 - protein, 18 aa, Homo sapiens
RVSMEETADRLGSIPLRQ

SEQ ID NO: 4043 - protein, 15 aa, Homo sapiens
KVHGGTTADMIYSRV

SEQ ID NO: 4044 - protein, 21 aa, Homo sapiens
KHTIALWQFLSAHKSEQLLRL

SEQ ID NO: 4045 - protein, 62 aa, Homo sapiens; identical to SEQ ID NO: 1391

SEQ ID NO: 4046 - protein, 15 aa, Homo sapiens
RGSPNETELIESAKG

SEQ ID NO: 4047 - protein, 16 aa, Homo sapiens
REQMLDTSSLLQFMRE

SEQ ID NO: 4048 - protein, 14 aa, Homo sapiens
RRLLNFDTELSTKE

SEQ ID NO: 4049 - protein, 23 aa, Homo sapiens
RLSVFLKKQEESQFHPLEWLARE

SEQ ID NO: 4050 - protein, 38 aa, Homo sapiens; identical to SEQ ID NO: 169

SEQ ID NO: 4051 - protein, 29 aa, Homo sapiens
RFQQGKDLQQYVSVVVLDEVGLAEDSPKM

SEQ ID NO: 4052 - protein, 18 aa, Homo sapiens
RILTIYPQVLHSLMEARW

SEQ ID NO: 4053 - protein, 16 aa, Homo sapiens
RLHNEIVYAVEKLSKE

SEQ ID NO: 4054 - protein, 24 aa, Homo sapiens
RNFSGKDDIQALDIFLANLPEAKC

SEQ ID NO: 4055 - protein, 13 aa, Homo sapiens
RAAINKHIQTLRD

SEQ ID NO: 4056 - protein, 22 aa, Homo sapiens
KDRVEQIKEYHHLHQAVHAAKV

SEQ ID NO: 4057 - protein, 17 aa, Homo sapiens
RVLGALLPFLDAQYQKV

SEQ ID NO: 4058 - protein, 33 aa, Homo sapiens; identical to SEQ ID NO: 19

SEQ ID NO: 4059 - protein, 14 aa, Homo sapiens
RSSLTLATAINQRG

SEQ ID NO: 4060 - protein, 12 aa, Homo sapiens
KALDKDQYLPRK

SEQ ID NO: 4061 - protein, 16 aa, Homo sapiens
KQFQNVQQVEYSSIRG

SEQ ID NO: 4062 - protein, 17 aa, Homo sapiens
KIIYGDPVTFLPHLPRK

SEQ ID NO: 4063 - protein, 33 aa, Homo sapiens; identical to SEQ ID NO: 152

SEQ ID NO: 4064 - protein, 12 aa, Homo sapiens
KNQFLDIWQLRE

SEQ ID NO: 4065 - protein, 14 aa, Homo sapiens
RYLVYGDEYKALRD

SEQ ID NO: 4066 - protein, 15 aa, Homo sapiens
RHDWNYEHLFMDIKN

SEQ ID NO: 4067 - protein, 17 aa, Homo sapiens
RALTEELHQKVSEEAKS

SEQ ID NO: 4068 - protein, 24 aa, Homo sapiens
RNFSGKDDIQALDIFLANLPEAKC

SEQ ID NO: 4069 - protein, 15 aa, Homo sapiens
RVKWPNDLYLQDRKL

SEQ ID NO: 4070 - protein, 14 aa, Homo sapiens
RHAIFTEITTFSRL

SEQ ID NO: 4071 - protein, 34 aa, Homo sapiens; identical to SEQ ID NO: 67

SEQ ID NO: 4072 - protein, 20 aa, Homo sapiens
KTIVADAMQGPAAYSDLFRS

SEQ ID NO: 4073 - protein, 11 aa, Homo sapiens
KLLQDISEARC

SEQ ID NO: 4074 - protein, 18 aa, Homo sapiens
RVSMEETADRLGSIPLRQ

SEQ ID NO: 4075 - protein, 10 aa, Homo sapiens
REELLLLKKE

SEQ ID NO: 4076 - protein, 17 aa, Homo sapiens
KEIAAVISPELEHLDKT

SEQ ID NO: 4077 - protein, 20 aa, Homo sapiens
RAADFLSEPEGGPEMAKEKQ

SEQ ID NO: 4078 - protein, 18 aa, Homo sapiens
RILTIYPQVLHSLMEARW

SEQ ID NO: 4079 - protein, 12 aa, Homo sapiens
RDLYQGLLLQRV

SEQ ID NO: 4080 - protein, 12 aa, Homo sapiens
RDTLVSYMQTKE

SEQ ID NO: 4081 - protein, 11 aa, Homo sapiens
RLESAGLGYRV

SEQ ID NO: 4082 - protein, 15 aa, Homo sapiens
RGIYVIQAPKGGQKI

SEQ ID NO: 4083 - protein, 20 aa, Homo sapiens
KTIVADAMQGPAAYSDLFRS

SEQ ID NO: 4084 - protein, 15 aa, Homo sapiens
RGIYVIQAPKGGQKI

SEQ ID NO: 4085 - protein, 21 aa, Homo sapiens
RTADNFDDILKHLLTLADVKH

SEQ ID NO: 4086 - protein, 17 aa, Homo sapiens
RKRITVEYLQHIVEQKN

SEQ ID NO: 4087 - protein, 12 aa, Homo sapiens
RVPILWHFLQKE

SEQ ID NO: 4088 - protein, 23 aa, Homo sapiens
RQRHNSFADFLQAHLHTADLERH

SEQ ID NO: 4089 - protein, 11 aa, Homo sapiens
KHVVPLPDGKS

SEQ ID NO: 4090 - protein, 17 aa, Homo sapiens
RALTEELHQKVSEEAKS

SEQ ID NO: 4091 - protein, 16 aa, Homo sapiens
RLHNEIVYAVEKLSKE

SEQ ID NO: 4092 - protein, 14 aa, Homo sapiens
RSSLTLATAINQRG

SEQ ID NO: 4093 - protein, 30 aa, Homo sapiens; identical to SEQ ID NO: 940

SEQ ID NO: 4094 - protein, 21 aa, Homo sapiens
KMLGHSADETIGVVHLVLRRL

SEQ ID NO: 4095 - protein, 18 aa, Homo sapiens
KIIYGDPVTFLPHLPRKS

SEQ ID NO: 4096 - protein, 14 aa, Homo sapiens
KQTLSAAAVFNDRL

SEQ ID NO: 4097 - protein, 25 aa, Homo sapiens
KLDNFINRPVKLIIGDKEIFGISRG

SEQ ID NO: 4098 - protein, 15 aa, Homo sapiens
RTQTGHVLGNPQRRD

SEQ ID NO: 4099 - protein, 18 aa, Homo sapiens
RATHYHLSSQVQEMAGKI

SEQ ID NO: 4100 - protein, 20 aa, Homo sapiens
RDLVKQFQNVQQVEYSSIRG

SEQ ID NO: 4101 - protein, 45 aa, Homo sapiens; identical to SEQ ID NO: 1186

SEQ ID NO: 4102 - protein, 35 aa, Homo sapiens; identical to SEQ ID NO: 600

SEQ ID NO: 4103 - protein, 11 aa, Homo sapiens
KYSVINEINKI

SEQ ID NO: 4104 - protein, 15 aa, Homo sapiens
RAQDLFLDGVPLRKT

SEQ ID NO: 4105 - protein, 20 aa, Homo sapiens
RGREPANEASVEYLQEVARI

SEQ ID NO: 4106 - protein, 14 aa, Homo sapiens
RLHKEPFGEISSRY

SEQ ID NO: 4107 - protein, 11 aa, Homo sapiens
RLESAGLGYRV

SEQ ID NO: 4108 - protein, 29 aa, Homo sapiens
KQILGQLDGGSVAVLPVVDSTNQYLLDRI

SEQ ID NO: 4109 - protein, 17 aa, Homo sapiens
KEIAAVISPELEHLDKT

SEQ ID NO: 4110 - protein, 14 aa, Homo sapiens
RDWGVDVFTVPGKG

SEQ ID NO: 4111 - protein, 14 aa, Homo sapiens
RDWGVDVFTVPGKG

SEQ ID NO: 4112 - protein, 16 aa, Homo sapiens
KGYSLPEPIPLLNAKQ

SEQ ID NO: 4113 - protein, 12 aa, Homo sapiens
RSTLMVSDVTRL

SEQ ID NO: 4114 - protein, 16 aa, Homo sapiens
RTRVPQFSFLDIFPKV

SEQ ID NO: 4115 - protein, 14 aa, Homo sapiens
RNDELNHLEEEGRF

SEQ ID NO: 4116 - protein, 11 aa, Homo sapiens
KHVVPLPDGKS

SEQ ID NO: 4117 - protein, 14 aa, Homo sapiens
RSAEKLQLPPLERL

SEQ ID NO: 4118 - protein, 26 aa, Homo sapiens
KLIALLANGEFHSGEQLGETLGMSRA

SEQ ID NO: 4119 - protein, 21 aa, Homo sapiens
KKVGFVGISNWALDPAKMNRG

SEQ ID NO: 4120 - protein, 33 aa, Homo sapiens; identical to SEQ ID NO: 19

SEQ ID NO: 4121 - protein, 36 aa, Homo sapiens; identical to SEQ ID NO: 745

SEQ ID NO: 4122 - protein, 14 aa, Homo sapiens
RVPFNVDFDKLPRH

SEQ ID NO: 4123 - protein, 13 aa, Homo sapiens
RLIAVADSVLTKV

SEQ ID NO: 4124 - protein, 14 aa, Homo sapiens
RHAIFTEITTFSRL

SEQ ID NO: 4125 - protein, 18 aa, Homo sapiens
RDFATPSLHTSDQSPGKH

SEQ ID NO: 4126 - protein, 15 aa, Homo sapiens
KHLIQVDFGVLAVRH

SEQ ID NO: 4127 - protein, 16 aa, Homo sapiens
KTLPTMNNLISQDKRI

SEQ ID NO: 4128 - protein, 34 aa, Homo sapiens; identical to SEQ ID NO: 40

SEQ ID NO: 4129 - protein, 13 aa, Homo sapiens
RLLNFDTELSTKE

SEQ ID NO: 4130 - protein, 24 aa, Homo sapiens
KILIFQTDFEDGIRSAQLIASAKY

SEQ ID NO: 4131 - protein, 14 aa, Homo sapiens
RVKWPNDLYLQDRK

SEQ ID NO: 4132 - protein, 17 aa, Homo sapiens
RALTEELHQKVSEEAKS

SEQ ID NO: 4133 - protein, 15 aa, Homo sapiens
KLIIGDKEIFGISRG

SEQ ID NO: 4134 - protein, 14 aa, Homo sapiens
RLGSIPLRQLVYRV

SEQ ID NO: 4135 - protein, 14 aa, Homo sapiens
KGLEDSVAKTFEKC

SEQ ID NO: 4136 - protein, 29 aa, Homo sapiens
RGIDKQGALLLEQDGVIKPWMGGEISLRS

SEQ ID NO: 4137 - protein, 18 aa, Homo sapiens
RATHYHLSSQVQEMAGKI

SEQ ID NO: 4138 - protein, 29 aa, Homo sapiens
RGIDKQGALLLEQDGVIKPWMGGEISLRS

SEQ ID NO: 4139 - protein, 24 aa, Homo sapiens
KILIFQTDFEDGIRSAQLIASAKY

SEQ ID NO: 4140 - protein, 16 aa, Homo sapiens
KTLPTMNNLISQDKRI

SEQ ID NO: 4141 - protein, 29 aa, Homo sapiens
KQILGQLDGGSVAVLPVVDSTNQYLLDRI

SEQ ID NO: 4142 - protein, 32 aa, Homo sapiens
KASTLSPGGGVTVFFHAIISLHFPFNPDLHKV

SEQ ID NO: 4143 - protein, 37 aa, Homo sapiens; identical to SEQ ID NO: 408

SEQ ID NO: 4144 - protein, 14 aa, Homo sapiens
RVKWPNDLYLQDRK

SEQ ID NO: 4145 - protein, 38 aa, Homo sapiens; identical to SEQ ID NO: 169

SEQ ID NO: 4146 - protein, 15 aa, Homo sapiens
RHDWNYEHLFMDIKN

SEQ ID NO: 4147 - protein, 18 aa, Homo sapiens
RILTIYPQVLHSLMEARW

SEQ ID NO: 4148 - protein, 29 aa, Homo sapiens
KQILGQLDGGSVAVLPVVDSTNQYLLDRI

SEQ ID NO: 4149 - protein, 35 aa, Homo sapiens; identical to SEQ ID NO: 600

SEQ ID NO: 4150 - protein, 18 aa, Homo sapiens
KVYSLLFADQLSYEVARQ

SEQ ID NO: 4151 - protein, 20 aa, Homo sapiens
RQPEDTWAALEGLSFSPFRE

SEQ ID NO: 4152 - protein, 44 aa, Homo sapiens; identical to SEQ ID NO: 34

SEQ ID NO: 4153 - protein, 22 aa, Homo sapiens
RAPKPTLLWLQQFDTEYSFLKE

SEQ ID NO: 4154 - protein, 11 aa, Homo sapiens
KLYIQQIVQRL

SEQ ID NO: 4155 - protein, 11 aa, Homo sapiens
RLESAGLGYRV

SEQ ID NO: 4156 - protein, 17 aa, Homo sapiens
RRLLNFDTELSTKEMRN

SEQ ID NO: 4157 - protein, 20 aa, Homo sapiens
RIFSTALFVEHVLLGTESRV

SEQ ID NO: 4158 - protein, 17 aa, Homo sapiens
RDVMTRDLYQGLLLQRV

SEQ ID NO: 4159 - protein, 11 aa, Homo sapiens
KHLLTLADVKH

SEQ ID NO: 4160 - protein, 15 aa, Homo sapiens
RLVESISLDENGTRV

SEQ ID NO: 4161 - protein, 14 aa, Homo sapiens
RVPFNVDFDKLPRH

SEQ ID NO: 4162 - protein, 13 aa, Homo sapiens
KILANVTEDAKRL

SEQ ID NO: 4163 - protein, 17 aa, Homo sapiens
RRLLNFDTELSTKEMRN

SEQ ID NO: 4164 - protein, 33 aa, Homo sapiens; identical to SEQ ID NO: 152

SEQ ID NO: 4165 - protein, 21 aa, Homo sapiens
RGLSQEGTGPPTSAGEGHSRT

SEQ ID NO: 4166 - protein, 34 aa, Homo sapiens; identical to SEQ ID NO: 67

SEQ ID NO: 4167 - protein, 16 aa, Homo sapiens
KGYSLPEPIPLLNAKQ

SEQ ID NO: 4168 - protein, 20 aa, Homo sapiens
KTIVADAMQGPAAYSDLFRS

SEQ ID NO: 4169 - protein, 23 aa, Homo sapiens
KRGPAAIGLGPVIGIVMAEALRK

SEQ ID NO: 4170 - protein, 12 aa, Homo sapiens
RLIDPQVDESRV

SEQ ID NO: 4171 - protein, 13 aa, Homo sapiens
KILANVTEDAKRL

SEQ ID NO: 4172 - protein, 15 aa, Homo sapiens
RAQDLFLDGVPLRKT

SEQ ID NO: 4173 - protein, 15 aa, Homo sapiens
RWEKLDNFINRPVKL

SEQ ID NO: 4174 - protein, 29 aa, Homo sapiens
RGIDKQGALLLEQDGVIKPWMGGEISLRS

SEQ ID NO: 4175 - protein, 24 aa, Homo sapiens
KILIFQTDFEDGIRSAQLIASAKY

SEQ ID NO: 4176 - protein, 20 aa, Homo sapiens
RGREPANEASVEYLQEVARI

SEQ ID NO: 4177 - protein, 20 aa, Homo sapiens
KTIVADAMQGPAAYSDLFRS

SEQ ID NO: 4178 - protein, 24 aa, Homo sapiens
KDLQQYVSVVVLDEVGLAEDSPKM

SEQ ID NO: 4179 - protein, 20 aa, Homo sapiens
RVMEELPLMLLSEFSLVDKL

SEQ ID NO: 4180 - protein, 23 aa, Homo sapiens
RGMEFVQGLSKPGRPHQWVFPKD

SEQ ID NO: 4181 - protein, 17 aa, Homo sapiens
KKQEESQFHPLEWLARE

SEQ ID NO: 4182 - protein, 15 aa, Homo sapiens
KLIIGDKEIFGISRG

SEQ ID NO: 4183 - protein, 17 aa, Homo sapiens
RALTEELHQKVSEEAKS

SEQ ID NO: 4184 - protein, 15 aa, Homo sapiens
RITVEYLQHIVEQKN

SEQ ID NO: 4185 - protein, 22 aa, Homo sapiens
RLLLDEITRAQDLFLDGVPLRK

SEQ ID NO: 4186 - protein, 25 aa, Homo sapiens
RLVEIQFPAEHGWKESLLGDMEWRL

SEQ ID NO: 4187 - protein, 17 aa, Homo sapiens
RALTEELHQKVSEEAKS

SEQ ID NO: 4188 - protein, 15 aa, Homo sapiens
RTQTGHVLGNPQRRD

SEQ ID NO: 4189 - protein, 15 aa, Homo sapiens
REYSLEEVKELLNKL

SEQ ID NO: 4190 - protein, 15 aa, Homo sapiens
KLIIGDKEIFGISRG

SEQ ID NO: 4191 - protein, 12 aa, Homo sapiens
KYVDLGLGTHRV

SEQ ID NO: 4192 - protein, 14 aa, Homo sapiens
RSSLTLATAINQRG

SEQ ID NO: 4193 - protein, 35 aa, Homo sapiens; identical to SEQ ID NO: 1242

SEQ ID NO: 4194 - protein, 14 aa, Homo sapiens
KQTLSAAAVFNDRL

SEQ ID NO: 4195 - protein, 29 aa, Homo sapiens
RGIDKQGALLLEQDGVIKPWMGGEISLRS

SEQ ID NO: 4196 - protein, 19 aa, Homo sapiens
RHSQDLSSKRLNDTVTVRL

SEQ ID NO: 4197 - protein, 62 aa, Homo sapiens; identical to SEQ ID NO: 1391

SEQ ID NO: 4198 - protein, 15 aa, Homo sapiens
RHDWNYEHLFMDIKN

SEQ ID NO: 4199 - protein, 14 aa, Homo sapiens
RLHKEPFGEISSRY

SEQ ID NO: 4200 - protein, 14 aa, Homo sapiens
RLSLKGIPTLVYRH

SEQ ID NO: 4201 - protein, 17 aa, Homo sapiens
RALTEELHQKVSEEAKS

SEQ ID NO: 4202 - protein, 12 aa, Homo sapiens
KESLLGDMEWRL

SEQ ID NO: 4203 - protein, 14 aa, Homo sapiens
RSAEKLQLPPLERL

SEQ ID NO: 4204 - protein, 62 aa, Homo sapiens; identical to SEQ ID NO: 1391

SEQ ID NO: 4205 - protein, 31 aa, Homo sapiens; identical to SEQ ID NO: 27

SEQ ID NO: 4206 - protein, 52 aa, Homo sapiens; identical to SEQ ID NO: 1474

SEQ ID NO: 4207 - protein, 35 aa, Homo sapiens; identical to SEQ ID NO: 600

SEQ ID NO: 4208 - protein, 18 aa, Homo sapiens
RATHYHLSSQVQEMAGKI

SEQ ID NO: 4209 - protein, 19 aa, Homo sapiens
KASNRKPSPQDIAQAVLRN

SEQ ID NO: 4210 - protein, 25 aa, Homo sapiens
RLQHVTISQLFAPGDLPELGLEHRA

SEQ ID NO: 4211 - protein, 15 aa, Homo sapiens
KLIIGDKEIFGISRG

SEQ ID NO: 4212 - protein, 20 aa, Homo sapiens
KTIVADAMQGPAAYSDLFRS

SEQ ID NO: 4213 - protein, 16 aa, Homo sapiens
RFATSLVDNSVPLLRA

SEQ ID NO: 4214 - protein, 11 aa, Homo sapiens
RLESAGLGYRV

SEQ ID NO: 4215 - protein, 15 aa, Homo sapiens
RGIYVIQAPKGGQKI

SEQ ID NO: 4216 - protein, 71 aa, Homo sapiens; identical to SEQ ID NO: 21

SEQ ID NO: 4217 - protein, 12 aa, Homo sapiens
RDSHIFQLFWRE

SEQ ID NO: 4218 - protein, 17 aa, Homo sapiens
RRLLNFDTELSTKEMRN

SEQ ID NO: 4219 - protein, 26 aa, Homo sapiens
KLIALLANGEFHSGEQLGETLGMSRA

SEQ ID NO: 4220 - protein, 14 aa, Homo sapiens
RLHKEPFGEISSRY

SEQ ID NO: 4221 - protein, 31 aa, Homo sapiens; identical to SEQ ID NO: 27

SEQ ID NO: 4222 - protein, 24 aa, Homo sapiens
RDLYQGLLLQRVPFNVDFDKLPRH

SEQ ID NO: 4223 - protein, 17 aa, Homo sapiens
RKRITVEYLQHIVEQKN

SEQ ID NO: 4224 - protein, 14 aa, Homo sapiens
RVPFNVDFDKLPRH

SEQ ID NO: 4225 - protein, 13 aa, Homo sapiens
KILANVTEDAKRL

SEQ ID NO: 4226 - protein, 17 aa, Homo sapiens
KVMNHITDGPRKDLVKG

SEQ ID NO: 4227 - protein, 24 aa, Homo sapiens
RDLYQGLLLQRVPFNVDFDKLPRH

SEQ ID NO: 4228 - protein, 62 aa, Homo sapiens; identical to SEQ ID NO: 1391

SEQ ID NO: 4229 - protein, 56 aa, Homo sapiens; identical to SEQ ID NO: 22

SEQ ID NO: 4230 - protein, 26 aa, Homo sapiens
RVHALPPSLIPLVWDFGQLSDVAEKL

SEQ ID NO: 4231 - protein, 16 aa, Homo sapiens
RETLDQINQELIQAKK

SEQ ID NO: 4232 - protein, 24 aa, Homo sapiens
RDLYQGLLLQRVPFNVDFDKLPRH

SEQ ID NO: 4233 - protein, 14 aa, Homo sapiens
RNDELNHLEEEGRF

SEQ ID NO: 4234 - protein, 14 aa, Homo sapiens
RSAEKLQLPPLERL

SEQ ID NO: 4235 - protein, 16 aa, Homo sapiens
RFATSLVDNSVPLLRA

SEQ ID NO: 4236 - protein, 26 aa, Homo sapiens
KLIALLANGEFHSGEQLGETLGMSRA

SEQ ID NO: 4237 - protein, 17 aa, Homo sapiens
RNTLKPSPQAWLQLVKN

SEQ ID NO: 4238 - protein, 23 aa, Homo sapiens
RLSAYSLGGFAAEWLSQEYFHRQ

SEQ ID NO: 4239 - protein, 21 aa, Homo sapiens
RGLSQEGTGPPTSAGEGHSRT

SEQ ID NO: 4240 - protein, 36 aa, Homo sapiens; identical to SEQ ID NO: 745

SEQ ID NO: 4241 - protein, 18 aa, Homo sapiens
KGFLQQHILKDLEQLAKM

SEQ ID NO: 4242 - protein, 20 aa, Homo sapiens
RVMEELPLMLLSEFSLVDKL

SEQ ID NO: 4243 - protein, 15 aa, Homo sapiens
RAQDLFLDGVPLRKT

SEQ ID NO: 4244 - protein, 23 aa, Homo sapiens
KDNAPPEKEVIESLLSLLFVQKG

SEQ ID NO: 4245 - protein, 14 aa, Homo sapiens
RLHKEPFGEISSRY

SEQ ID NO: 4246 - protein, 56 aa, Homo sapiens; identical to SEQ ID NO: 22

SEQ ID NO: 4247 - protein, 20 aa, Homo sapiens
RAADFLSEPEGGPEMAKEKQ

SEQ ID NO: 4248 - protein, 15 aa, Homo sapiens
RHDWNYEHLFMDIKN

SEQ ID NO: 4249 - protein, 14 aa, Homo sapiens
RAQDLFLDGVPLRK

SEQ ID NO: 4250 - protein, 28 aa, Homo sapiens
RDWGVDVFTVPGKGYSLPEPIPLLNAKQ

SEQ ID NO: 4251 - protein, 17 aa, Homo sapiens
RRLLNFDTELSTKEMRN

SEQ ID NO: 4252 - protein, 14 aa, Homo sapiens
RSAEKLQLPPLERL

SEQ ID NO: 4253 - protein, 14 aa, Homo sapiens
RLHKEPFGEISSRY

SEQ ID NO: 4254 - protein, 38 aa, Homo sapiens; identical to SEQ ID NO: 959

SEQ ID NO: 4255 - protein, 17 aa, Homo sapiens
RALTEELHQKVSEEAKS

SEQ ID NO: 4256 - protein, 14 aa, Homo sapiens
RSSLTLATAINQRG

SEQ ID NO: 4257 - protein, 18 aa, Homo sapiens
KVYSLLFADQLSYEVARQ

SEQ ID NO: 4258 - protein, 13 aa, Homo sapiens
REEDLAPFSLRKR

SEQ ID NO: 4259 - protein, 17 aa, Homo sapiens
RALTEELHQKVSEEAKS

SEQ ID NO: 4260 - protein, 22 aa, Homo sapiens
KVGKETSELGGSDVSILDTTRL

SEQ ID NO: 4261 - protein, 21 aa, Homo sapiens
RHNSFADFLQAHLHTADLERH

SEQ ID NO: 4262 - protein, 25 aa, Homo sapiens
RRVEESVVNQGWITLQEAGINLDRN

SEQ ID NO: 4263 - protein, 29 aa, Homo sapiens
KQILGQLDGGSVAVLPVVDSTNQYLLDRI

SEQ ID NO: 4264 - protein, 20 aa, Homo sapiens
KTIVADAMQGPAAYSDLFRS

SEQ ID NO: 4265 - protein, 15 aa, Homo sapiens
RRLLQEQHQLSSRRL

SEQ ID NO: 4266 - protein, 20 aa, Homo sapiens
KDVVKQQGLRQDHPGQMDRY

SEQ ID NO: 4267 - protein, 23 aa, Homo sapiens
KTSAYSRNDELNHLEEEGRFLKA

SEQ ID NO: 4268 - protein, 45 aa, Homo sapiens; identical to SEQ ID NO: 1186

SEQ ID NO: 4269 - protein, 16 aa, Homo sapiens
RTEDAAQELLLPESKG

SEQ ID NO: 4270 - protein, 18 aa, Homo sapiens
RVSMEETADRLGSIPLRQ

SEQ ID NO: 4271 - protein, 20 aa, Homo sapiens
KVGFVGISNWALDPAKMNRG

SEQ ID NO: 4272 - protein, 26 aa, Homo sapiens
KIKDYLEELWVQAQYITDAEGLPKKF

SEQ ID NO: 4273 - protein, 33 aa, Homo sapiens; identical to SEQ ID NO: 28

SEQ ID NO: 4274 - protein, 14 aa, Homo sapiens
RVPQFSFLDIFPKV

SEQ ID NO: 4275 - protein, 31 aa, Homo sapiens; identical to SEQ ID NO: 27

SEQ ID NO: 4276 - protein, 19 aa, Homo sapiens
RVPELQGLVTEHVFLLDKC

SEQ ID NO: 4277 - protein, 29 aa, Homo sapiens
RGIDKQGALLLEQDGVIKPWMGGEISLRS

SEQ ID NO: 4278 - protein, 48 aa, Homo sapiens; identical to SEQ ID NO: 18

SEQ ID NO: 4279 - protein, 22 aa, Homo sapiens
RAALELFEQEGLAPYLPRWEKL

SEQ ID NO: 4280 - protein, 29 aa, Homo sapiens
KQILGQLDGGSVAVLPVVDSTNQYLLDRI

SEQ ID NO: 4281 - protein, 35 aa, Homo sapiens; identical to SEQ ID NO: 1014

SEQ ID NO: 4282 - protein, 38 aa, Homo sapiens; identical to SEQ ID NO: 169

SEQ ID NO: 4283 - protein, 14 aa, Homo sapiens
RAQDLFLDGVPLRK

SEQ ID NO: 4284 - protein, 31 aa, Homo sapiens; identical to SEQ ID NO: 27

SEQ ID NO: 4285 - protein, 16 aa, Homo sapiens
KGYSLPEPIPLLNAKQ

SEQ ID NO: 4286 - protein, 29 aa, Homo sapiens
RGIDKQGALLLEQDGVIKPWMGGEISLRS

SEQ ID NO: 4287 - protein, 12 aa, Homo sapiens
RDLYQGLLLQRV

SEQ ID NO: 4288 - protein, 38 aa, Homo sapiens; identical to SEQ ID NO: 169

SEQ ID NO: 4289 - protein, 21 aa, Homo sapiens
RTADNFDDILKHLLTLADVKH

SEQ ID NO: 4290 - protein, 38 aa, Homo sapiens; identical to SEQ ID NO: 169

SEQ ID NO: 4291 - protein, 17 aa, Homo sapiens
RALTEELHQKVSEEAKS

SEQ ID NO: 4292 - protein, 25 aa, Homo sapiens
KQGALLLEQDGVIKPWMGGEISLRS

SEQ ID NO: 4293 - protein, 14 aa, Homo sapiens
RLHKEPFGEISSRY

SEQ ID NO: 4294 - protein, 17 aa, Homo sapiens
KIIYGDPVTFLPHLPRK

SEQ ID NO: 4295 - protein, 15 aa, Homo sapiens
RAQDLFLDGVPLRKT

SEQ ID NO: 4296 - protein, 35 aa, Homo sapiens; identical to SEQ ID NO: 1242

SEQ ID NO: 4297 - protein, 29 aa, Homo sapiens
KNLAFSPATMAHAFLPTMPEDLLAQARRW

SEQ ID NO: 4298 - protein, 12 aa, Homo sapiens
RDLYQGLLLQRV

SEQ ID NO: 4299 - protein, 14 aa, Homo sapiens
KGLEDSVAKTFEKC

SEQ ID NO: 4300 - protein, 29 aa, Homo sapiens
RGIDKQGALLLEQDGVIKPWMGGEISLRS

SEQ ID NO: 4301 - protein, 14 aa, Homo sapiens
RSLETNGEINLPKD

SEQ ID NO: 4302 - protein, 45 aa, Homo sapiens; identical to SEQ ID NO: 178

SEQ ID NO: 4303 - protein, 16 aa, Homo sapiens
REQMLDTSSLLQFMRE

SEQ ID NO: 4304 - protein, 15 aa, Homo sapiens
RGSPNETELIESAKG

SEQ ID NO: 4305 - protein, 18 aa, Homo sapiens
KIIYGDPVTFLPHLPRKS

SEQ ID NO: 4306 - protein, 14 aa, Homo sapiens
RLHKEPFGEISSRY

SEQ ID NO: 4307 - protein, 12 aa, Homo sapiens
KKLLQDISEARC

SEQ ID NO: 4308 - protein, 15 aa, Homo sapiens
KLIIGDKEIFGISRG

SEQ ID NO: 4309 - protein, 29 aa, Homo sapiens
KQILGQLDGGSVAVLPVVDSTNQYLLDRI

SEQ ID NO: 4310 - protein, 14 aa, Homo sapiens
RVPFNVDFDKLPRH

SEQ ID NO: 4311 - protein, 22 aa, Homo sapiens
KVVGDLLSGTILVGQLELIIKH

SEQ ID NO: 4312 - protein, 16 aa, Homo sapiens
RFATSLVDNSVPLLRA

SEQ ID NO: 4313 - protein, 29 aa, Homo sapiens
RGIDKQGALLLEQDGVIKPWMGGEISLRS

SEQ ID NO: 4314 - protein, 17 aa, Homo sapiens
RETLDQINQELIQAKKL

SEQ ID NO: 4315 - protein, 34 aa, Homo sapiens; identical to SEQ ID NO: 193

SEQ ID NO: 4316 - protein, 15 aa, Homo sapiens
RAQDLFLDGVPLRKT

SEQ ID NO: 4317 - protein, 30 aa, Homo sapiens; identical to SEQ ID NO: 940

SEQ ID NO: 4318 - protein, 34 aa, Homo sapiens; identical to SEQ ID NO: 857

SEQ ID NO: 4319 - protein, 18 aa, Homo sapiens
RILTIYPQVLHSLMEARW

SEQ ID NO: 4320 - protein, 46 aa, Homo sapiens; identical to SEQ ID NO: 1885

SEQ ID NO: 4321 - protein, 20 aa, Homo sapiens
RDLVKQFQNVQQVEYSSIRG

SEQ ID NO: 4322 - protein, 20 aa, Homo sapiens
KTIVADAMQGPAAYSDLFRS

SEQ ID NO: 4323 - protein, 20 aa, Homo sapiens
KVGFVGISNWALDPAKMNRG

SEQ ID NO: 4324 - protein, 29 aa, Homo sapiens
KNLAFSPATMAHAFLPTMPEDLLAQARRW

SEQ ID NO: 4325 - protein, 39 aa, Homo sapiens; identical to SEQ ID NO: 496

SEQ ID NO: 4326 - protein, 25 aa, Homo sapiens
RAPKPTLLWLQQFDTEYSFLKEVRN

SEQ ID NO: 4327 - protein, 29 aa, Homo sapiens
RGIDKQGALLLEQDGVIKPWMGGEISLRS

SEQ ID NO: 4328 - protein, 36 aa, Homo sapiens; identical to SEQ ID NO: 745

SEQ ID NO: 4329 - protein, 37 aa, Homo sapiens; identical to SEQ ID NO: 408

SEQ ID NO: 4330 - protein, 29 aa, Homo sapiens
RGIDKQGALLLEQDGVIKPWMGGEISLRS

SEQ ID NO: 4331 - protein, 45 aa, Homo sapiens; identical to SEQ ID NO: 178

SEQ ID NO: 4332 - protein, 15 aa, Homo sapiens
RAQDLFLDGVPLRKT

SEQ ID NO: 4333 - protein, 23 aa, Homo sapiens
KTSAYSRNDELNHLEEEGRFLKA

SEQ ID NO: 4334 - protein, 16 aa, Homo sapiens
RFATSLVDNSVPLLRA

SEQ ID NO: 4335 - protein, 17 aa, Homo sapiens
RNDELNHLEEEGRFLKA

SEQ ID NO: 4336 - protein, 33 aa, Homo sapiens; identical to SEQ ID NO: 152

SEQ ID NO: 4337 - protein, 29 aa, Homo sapiens
KQILGQLDGGSVAVLPVVDSTNQYLLDRI

SEQ ID NO: 4338 - protein, 14 aa, Homo sapiens
RGGTNADTIKLVKV

SEQ ID NO: 4339 - protein, 25 aa, Homo sapiens
RAPKPTLLWLQQFDTEYSFLKEVRN

SEQ ID NO: 4340 - protein, 20 aa, Homo sapiens
RAADFLSEPEGGPEMAKEKQ

SEQ ID NO: 4341 - protein, 35 aa, Homo sapiens; identical to SEQ ID NO: 1014

SEQ ID NO: 4342 - protein, 15 aa, Homo sapiens
RETVQEFDLEKIQRQ

SEQ ID NO: 4343 - protein, 21 aa, Homo sapiens
KSGEVTLAEIDVIFKDFVNKY

SEQ ID NO: 4344 - protein, 22 aa, Homo sapiens
RGPAAIGLGPVIGIVMAEALRK

SEQ ID NO: 4345 - protein, 29 aa, Homo sapiens
KQILGQLDGGSVAVLPVVDSTNQYLLDRI

SEQ ID NO: 4346 - protein, 28 aa, Homo sapiens
KDLQQYVSVVVLDEVGLAEDSPKMPLKT

SEQ ID NO: 4347 - protein, 59 aa, Homo sapiens; identical to SEQ ID NO: 88

SEQ ID NO: 4348 - protein, 21 aa, Homo sapiens
KHTIALWQFLSAHKSEQLLRL

SEQ ID NO: 4349 - protein, 14 aa, Homo sapiens
RSSLTLATAINQRG

SEQ ID NO: 4350 - protein, 23 aa, Homo sapiens
KAASEAPEEEVSLPWVHLAYQRF

SEQ ID NO: 4351 - protein, 18 aa, Homo sapiens
RENSDVKTHGPFEAVMRT

SEQ ID NO: 4352 - protein, 20 aa, Homo sapiens
RDLVKQFQNVQQVEYSSIRG

SEQ ID NO: 4353 - protein, 20 aa, Homo sapiens
KVGFVGISNWALDPAKMNRG

SEQ ID NO: 4354 - protein, 28 aa, Homo sapiens
KNLAFSPATMAHAFLPTMPEDLLAQARR

SEQ ID NO: 4355 - protein, 38 aa, Homo sapiens; identical to SEQ ID NO: 169

SEQ ID NO: 4356 - protein, 24 aa, Homo sapiens
KDLQQYVSVVVLDEVGLAEDSPKM

SEQ ID NO: 4357 - protein, 16 aa, Homo sapiens
RETLDQINQELIQAKK

SEQ ID NO: 4358 - protein, 52 aa, Homo sapiens; identical to SEQ ID NO: 1474

SEQ ID NO: 4359 - protein, 18 aa, Homo sapiens
KGFLQQHILKDLEQLAKM

SEQ ID NO: 4360 - protein, 17 aa, Homo sapiens
RALTEELHQKVSEEAKS

SEQ ID NO: 4361 - protein, 28 aa, Homo sapiens
KDLQQYVSVVVLDEVGLAEDSPKMPLKT

SEQ ID NO: 4362 - protein, 24 aa, Homo sapiens
KRGPAAIGLGPVIGIVMAEALRKL

SEQ ID NO: 4363 - protein, 34 aa, Homo sapiens; identical to SEQ ID NO: 193

SEQ ID NO: 4364 - protein, 20 aa, Homo sapiens
KVGFVGISNWALDPAKMNRG

SEQ ID NO: 4365 - protein, 24 aa, Homo sapiens
KISPDTVLHLILPESPGSHEESRE

SEQ ID NO: 4366 - protein, 16 aa, Homo sapiens
KQFQNVQQVEYSSIRG

SEQ ID NO: 4367 - protein, 21 aa, Homo sapiens
RHNSFADFLQAHLHTADLERH

SEQ ID NO: 4368 - protein, 20 aa, Homo sapiens
KTIVADAMQGPAAYSDLFRS

SEQ ID NO: 4369 - protein, 24 aa, Homo sapiens
KVVGDLLSGTILVGQLELIIKHKN

SEQ ID NO: 4370 - protein, 42 aa, Homo sapiens; identical to SEQ ID NO: 57

SEQ ID NO: 4371 - protein, 23 aa, Homo sapiens
RGMEFVQGLSKPGRPHQWVFPKD

SEQ ID NO: 4372 - protein, 15 aa, Homo sapiens
RAQDLFLDGVPLRKT

SEQ ID NO: 4373 - protein, 34 aa, Homo sapiens; identical to SEQ ID NO: 40

SEQ ID NO: 4374 - protein, 39 aa, Homo sapiens; identical to SEQ ID NO: 496

SEQ ID NO: 4375 - protein, 44 aa, Homo sapiens; identical to SEQ ID NO: 34

SEQ ID NO: 4376 - protein, 56 aa, Homo sapiens; identical to SEQ ID NO: 22

SEQ ID NO: 4377 - protein, 62 aa, Homo sapiens; identical to SEQ ID NO: 1391

SEQ ID NO: 4378 - protein, 25 aa, Homo sapiens
KIKDYLEELWVQAQYITDAEGLPKK

SEQ ID NO: 4379 - protein, 17 aa, Homo sapiens
KVGFVGISNWALDPAKM

SEQ ID NO: 4380 - protein, 23 aa, Homo sapiens
RRVMEELPLMLLSEFSLVDKLRI

SEQ ID NO: 4381 - protein, 26 aa, Homo sapiens
KLIALLANGEFHSGEQLGETLGMSRA

SEQ ID NO: 4382 - protein, 17 aa, Homo sapiens
RNDELNHLEEEGRFLKA

SEQ ID NO: 4383 - protein, 20 aa, Homo sapiens
KTIVADAMQGPAAYSDLFRS

SEQ ID NO: 4384 - protein, 35 aa, Homo sapiens; identical to SEQ ID NO: 1014

SEQ ID NO: 4385 - protein, 25 aa, Homo sapiens
RRVEESVVNQGWITLQEAGINLDRN

SEQ ID NO: 4386 - protein, 21 aa, Homo sapiens
RHNSFADFLQAHLHTADLERH

SEQ ID NO: 4387 - protein, 48 aa, Homo sapiens; identical to SEQ ID NO: 18

SEQ ID NO: 4388 - protein, 14 aa, Homo sapiens
RSAEKLQLPPLERL

SEQ ID NO: 4389 - protein, 16 aa, Homo sapiens
KHYLDINTVLEKWQKS

SEQ ID NO: 4390 - protein, 14 aa, Homo sapiens
KQTLSAAAVFNDRL

SEQ ID NO: 4391 - protein, 22 aa, Homo sapiens
RNNWEKEIAAVISPELEHLDKT

SEQ ID NO: 4392 - protein, 29 aa, Homo sapiens
RGIDKQGALLLEQDGVIKPWMGGEISLRS

SEQ ID NO: 4393 - protein, 17 aa, Homo sapiens
KIIYGDPVTFLPHLPRK

SEQ ID NO: 4394 - protein, 38 aa, Homo sapiens; identical to SEQ ID NO: 169

SEQ ID NO: 4395 - protein, 16 aa, Homo sapiens
RTEDAAQELLLPESKG

SEQ ID NO: 4396 - protein, 18 aa, Homo sapiens
RAADFLSEPEGGPEMAKE

SEQ ID NO: 4397 - protein, 56 aa, Homo sapiens; identical to SEQ ID NO: 22

SEQ ID NO: 4398 - protein, 24 aa, Homo sapiens
RDLYQGLLLQRVPFNVDFDKLPRH

SEQ ID NO: 4399 - protein, 15 aa, Homo sapiens
KLIIGDKEIFGISRG

SEQ ID NO: 4400 - protein, 21 aa, Homo sapiens
RGLSQEGTGPPTSAGEGHSRT

SEQ ID NO: 4401 - protein, 29 aa, Homo sapiens
RGIDKQGALLLEQDGVIKPWMGGEISLRS

SEQ ID NO: 4402 - protein, 29 aa, Homo sapiens
KQILGQLDGGSVAVLPVVDSTNQYLLDRI

SEQ ID NO: 4403 - protein, 18 aa, Homo sapiens
RENSDVKTHGPFEAVMRT

SEQ ID NO: 4404 - protein, 25 aa, Homo sapiens
RAPKPTLLWLQQFDTEYSFLKEVRN

SEQ ID NO: 4405 - protein, 35 aa, Homo sapiens; identical to SEQ ID NO: 1014

SEQ ID NO: 4406 - protein, 29 aa, Homo sapiens
KQILGQLDGGSVAVLPVVDSTNQYLLDRI

SEQ ID NO: 4407 - protein, 35 aa, Homo sapiens; identical to SEQ ID NO: 600

SEQ ID NO: 4408 - protein, 26 aa, Homo sapiens
KLIALLANGEFHSGEQLGETLGMSRA

SEQ ID NO: 4409 - protein, 22 aa, Homo sapiens
RVMEELPLMLLSEFSLVDKLRI

SEQ ID NO: 4410 - protein, 28 aa, Homo sapiens
KDLQQYVSVVVLDEVGLAEDSPKMPLKT

SEQ ID NO: 4411 - protein, 20 aa, Homo sapiens
RAADFLSEPEGGPEMAKEKQ

SEQ ID NO: 4412 - protein, 38 aa, Homo sapiens; identical to SEQ ID NO: 169

SEQ ID NO: 4413 - protein, 23 aa, Homo sapiens
RQRHNSFADFLQAHLHTADLERH

SEQ ID NO: 4414 - protein, 20 aa, Homo sapiens
KVGFVGISNWALDPAKMNRG

SEQ ID NO: 4415 - protein, 29 aa, Homo sapiens
RGIDKQGALLLEQDGVIKPWMGGEISLRS

SEQ ID NO: 4416 - protein, 30 aa, Homo sapiens; identical to SEQ ID NO: 1299

SEQ ID NO: 4417 - protein, 35 aa, Homo sapiens; identical to SEQ ID NO: 1242

SEQ ID NO: 4418 - protein, 33 aa, Homo sapiens; identical to SEQ ID NO: 28

SEQ ID NO: 4419 - protein, 16 aa, Homo sapiens
KGYSLPEPIPLLNAKQ

SEQ ID NO: 4420 - protein, 35 aa, Homo sapiens; identical to SEQ ID NO: 600

SEQ ID NO: 4421 - protein, 15 aa, Homo sapiens
KVHGGTTADMIYSRV

SEQ ID NO: 4422 - protein, 15 aa, Homo sapiens
RGSPNETELIESAKG

SEQ ID NO: 4423 - protein, 62 aa, Homo sapiens; identical to SEQ ID NO: 1391

SEQ ID NO: 4424 - protein, 31 aa, Homo sapiens; identical to SEQ ID NO: 27

SEQ ID NO: 4425 - protein, 17 aa, Homo sapiens
KIIYGDPVTFLPHLPRK

SEQ ID NO: 4426 - protein, 15 aa, Homo sapiens
RITVEYLQHIVEQKN

SEQ ID NO: 4427 - protein, 44 aa, Homo sapiens; identical to SEQ ID NO: 34

SEQ ID NO: 4428 - protein, 20 aa, Homo sapiens
KVGFVGISNWALDPAKMNRG

SEQ ID NO: 4429 - protein, 27 aa, Homo sapiens
RLIDPQVDESRVLGALLPFLDAQYQKV

SEQ ID NO: 4430 - protein, 20 aa, Homo sapiens
RIFSTALFVEHVLLGTESRV

SEQ ID NO: 4431 - protein, 22 aa, Homo sapiens
RAALELFEQEGLAPYLPRWEKL

SEQ ID NO: 4432 - protein, 25 aa, Homo sapiens
KQGALLLEQDGVIKPWMGGEISLRS

SEQ ID NO: 4433 - protein, 30 aa, Homo sapiens; identical to SEQ ID NO: 940

SEQ ID NO: 4434 - protein, 23 aa, Homo sapiens
KVFVTPQAPLEAIQAYLAGHYRV

SEQ ID NO: 4435 - protein, 19 aa, Homo sapiens
KASNRKPSPQDIAQAVLRN

SEQ ID NO: 4436 - protein, 56 aa, Homo sapiens; identical to SEQ ID NO: 22

SEQ ID NO: 4437 - protein, 34 aa, Homo sapiens; identical to SEQ ID NO: 40

SEQ ID NO: 4438 - protein, 17 aa, Homo sapiens
KIIYGDPVTFLPHLPRK

SEQ ID NO: 4439 - protein, 22 aa, Homo sapiens
KVGKETSELGGSDVSILDTTRL

SEQ ID NO: 4440 - protein, 33 aa, Homo sapiens; identical to SEQ ID NO: 28

SEQ ID NO: 4441 - protein, 15 aa, Homo sapiens
RITVEYLQHIVEQKN

SEQ ID NO: 4442 - protein, 26 aa, Homo sapiens
KVFVTPQAPLEAIQAYLAGHYRVPKQ

SEQ ID NO: 4443 - protein, 62 aa, Homo sapiens; identical to SEQ ID NO: 1391

SEQ ID NO: 4444 - protein, 14 aa, Homo sapiens
RLSLKGIPTLVYRH

SEQ ID NO: 4445 - protein, 35 aa, Homo sapiens; identical to SEQ ID NO: 1234

SEQ ID NO: 4446 - protein, 17 aa, Homo sapiens
RNTLKPSPQAWLQLVKN

SEQ ID NO: 4447 - protein, 14 aa, Homo sapiens
RSSLTLATAINQRG

SEQ ID NO: 4448 - protein, 28 aa, Homo sapiens
RDWGVDVFTVPGKGYSLPEPIPLLNAKQ

SEQ ID NO: 4449 - protein, 17 aa, Homo sapiens
RNTLKPSPQAWLQLVKN

SEQ ID NO: 4450 - protein, 25 aa, Homo sapiens
KQGALLLEQDGVIKPWMGGEISLRS

SEQ ID NO: 4451 - protein, 23 aa, Homo sapiens
RDETGNNSVQTVFQGTLAATKRW

SEQ ID NO: 4452 - protein, 23 aa, Homo sapiens
RLSAYSLGGFAAEWLSQEYFHRQ

SEQ ID NO: 4453 - protein, 29 aa, Homo sapiens
KQILGQLDGGSVAVLPVVDSTNQYLLDRI

SEQ ID NO: 4454 - protein, 16 aa, Homo sapiens
REQMLDTSSLLQFMRE

SEQ ID NO: 4455 - protein, 44 aa, Homo sapiens; identical to SEQ ID NO: 34

SEQ ID NO: 4456 - protein, 38 aa, Homo sapiens; identical to SEQ ID NO: 169

SEQ ID NO: 4457 - protein, 29 aa, Homo sapiens
RGIDKQGALLLEQDGVIKPWMGGEISLRS

SEQ ID NO: 4458 - protein, 29 aa, Homo sapiens
RGIDKQGALLLEQDGVIKPWMGGEISLRS

SEQ ID NO: 4459 - protein, 34 aa, Homo sapiens; identical to SEQ ID NO: 193

SEQ ID NO: 4460 - protein, 29 aa, Homo sapiens
RGIDKQGALLLEQDGVIKPWMGGEISLRS

SEQ ID NO: 4461 - protein, 20 aa, Homo sapiens
KVGFVGISNWALDPAKMNRG

SEQ ID NO: 4462 - protein, 31 aa, Homo sapiens; identical to SEQ ID NO: 957

SEQ ID NO: 4463 - protein, 29 aa, Homo sapiens
RGIDKQGALLLEQDGVIKPWMGGEISLRS

SEQ ID NO: 4464 - protein, 22 aa, Homo sapiens
RVMEELPLMLLSEFSLVDKLRI

SEQ ID NO: 4465 - protein, 39 aa, Homo sapiens; identical to SEQ ID NO: 496

SEQ ID NO: 4466 - protein, 45 aa, Homo sapiens; identical to SEQ ID NO: 178

SEQ ID NO: 4467 - protein, 32 aa, Homo sapiens; identical to SEQ ID NO: 4142

SEQ ID NO: 4468 - protein, 23 aa, Homo sapiens
RQRHNSFADFLQAHLHTADLERH

SEQ ID NO: 4469 - protein, 31 aa, Homo sapiens; identical to SEQ ID NO: 27

SEQ ID NO: 4470 - protein, 29 aa, Homo sapiens
KQILGQLDGGSVAVLPVVDSTNQYLLDRI

SEQ ID NO: 4471 - protein, 22 aa, Homo sapiens
RVMEELPLMLLSEFSLVDKLRI

SEQ ID NO: 4472 - protein, 29 aa, Homo sapiens
RGIDKQGALLLEQDGVIKPWMGGEISLRS

SEQ ID NO: 4473 - protein, 23 aa, Homo sapiens
KAASEAPEEEVSLPWVHLAYQRF

SEQ ID NO: 4474 - protein, 31 aa, Homo sapiens; identical to SEQ ID NO: 957

SEQ ID NO: 4475 - protein, 21 aa, Homo sapiens
RHNSFADFLQAHLHTADLERH

SEQ ID NO: 4476 - protein, 31 aa, Homo sapiens; identical to SEQ ID NO: 957

SEQ ID NO: 4477 - protein, 21 aa, Homo sapiens
RHNSFADFLQAHLHTADLERH

SEQ ID NO: 4478 - protein, 16 aa, Homo sapiens
KTKDEMAAAEEKVGKN

SEQ ID NO: 4479 - protein, 18 aa, Homo sapiens
RATHYHLSSQVQEMAGKI

SEQ ID NO: 4480 - protein, 29 aa, Homo sapiens
RGIDKQGALLLEQDGVIKPWMGGEISLRS

SEQ ID NO: 4481 - protein, 19 aa, Homo sapiens
KETSELGGSDVSILDTTRL

SEQ ID NO: 4482 - protein, 44 aa, Homo sapiens; identical to SEQ ID NO: 34

SEQ ID NO: 4483 - protein, 25 aa, Homo sapiens
KLKAASEAPEEEVSLPWVHLAYQRF

SEQ ID NO: 4484 - protein, 22 aa, Homo sapiens
RVMEELPLMLLSEFSLVDKLRI

SEQ ID NO: 4485 - protein, 14 aa, Homo sapiens
RDGFHLVKDKADRT

SEQ ID NO: 4486 - protein, 29 aa, Homo sapiens
KQILGQLDGGSVAVLPVVDSTNQYLLDRI

SEQ ID NO: 4487 - protein, 21 aa, Homo sapiens
RGLSQEGTGPPTSAGEGHSRT

SEQ ID NO: 4488 - protein, 26 aa, Homo sapiens
RKLKAASEAPEEEVSLPWVHLAYQRF

SEQ ID NO: 4489 - protein, 34 aa, Homo sapiens; identical to SEQ ID NO: 857

SEQ ID NO: 4490 - protein, 38 aa, Homo sapiens; identical to SEQ ID NO: 169

SEQ ID NO: 4491 - protein, 33 aa, Homo sapiens; identical to SEQ ID NO: 19

SEQ ID NO: 4492 - protein, 20 aa, Homo sapiens
KMLGHSADETIGVVHLVLRR

SEQ ID NO: 4493 - protein, 48 aa, Homo sapiens; identical to SEQ ID NO: 18

SEQ ID NO: 4494 - protein, 21 aa, Homo sapiens
RGLSQEGTGPPTSAGEGHSRT

SEQ ID NO: 4495 - protein, 16 aa, Homo sapiens
KQEESQFHPLEWLARE

SEQ ID NO: 4496 - protein, 21 aa, Homo sapiens
RTADNFDDILKHLLTLADVKH

SEQ ID NO: 4497 - protein, 35 aa, Homo sapiens; identical to SEQ ID NO: 600

SEQ ID NO: 4498 - protein, 33 aa, Homo sapiens; identical to SEQ ID NO: 152

SEQ ID NO: 4499 - protein, 29 aa, Homo sapiens
RGIDKQGALLLEQDGVIKPWMGGEISLRS

SEQ ID NO: 4500 - protein, 22 aa, Homo sapiens
RVMEELPLMLLSEFSLVDKLRI

SEQ ID NO: 4501 - protein, 23 aa, Homo sapiens
KQNIFGPSQKVPGGEQEDAESRY

SEQ ID NO: 4502 - protein, 29 aa, Homo sapiens
RGIDKQGALLLEQDGVIKPWMGGEISLRS

SEQ ID NO: 4503 - protein, 23 aa, Homo sapiens
RLLLDEITRAQDLFLDGVPLRKT

SEQ ID NO: 4504 - protein, 28 aa, Homo sapiens
RDWGVDVFTVPGKGYSLPEPIPLLNAKQ

SEQ ID NO: 4505 - protein, 27 aa, Homo sapiens
KLLSTFLNQTGLDAFLLELHEMIILKL

SEQ ID NO: 4506 - protein, 29 aa, Homo sapiens
KQILGQLDGGSVAVLPVVDSTNQYLLDRI

SEQ ID NO: 4507 - protein, 28 aa, Homo sapiens
KNLAFSPATMAHAFLPTMPEDLLAQARR

SEQ ID NO: 4508 - protein, 38 aa, Homo sapiens; identical to SEQ ID NO: 169

SEQ ID NO: 4509 - protein, 21 aa, Homo sapiens
RGLSQEGTGPPTSAGEGHSRT

SEQ ID NO: 4510 - protein, 29 aa, Homo sapiens
KQILGQLDGGSVAVLPVVDSTNQYLLDRI

SEQ ID NO: 4511 - protein, 36 aa, Homo sapiens; identical to SEQ ID NO: 745

SEQ ID NO: 4512 - protein, 17 aa, Homo sapiens
RNTLKPSPQAWLQLVKN

SEQ ID NO: 4513 - protein, 34 aa, Homo sapiens; identical to SEQ ID NO: 857

SEQ ID NO: 4514 - protein, 33 aa, Homo sapiens; identical to SEQ ID NO: 152

SEQ ID NO: 4515 - protein, 25 aa, Homo sapiens
RLQHVTISQLFAPGDLPELGLEHRA

SEQ ID NO: 4516 - protein, 23 aa, Homo sapiens
RATHYHLSSQVQEMAGKIDLLRD

SEQ ID NO: 4517 - protein, 27 aa, Homo sapiens
KLLSTFLNQTGLDAFLLELHEMIILKL

SEQ ID NO: 4518 - protein, 28 aa, Homo sapiens
KDLQQYVSVVVLDEVGLAEDSPKMPLKT

SEQ ID NO: 4519 - protein, 62 aa, Homo sapiens; identical to SEQ ID NO: 1391

SEQ ID NO: 4520 - protein, 20 aa, Homo sapiens
KTSAYSRNDELNHLEEEGRF

SEQ ID NO: 4521 - protein, 21 aa, Homo sapiens
RGLSQEGTGPPTSAGEGHSRT

SEQ ID NO: 4522 - protein, 35 aa, Homo sapiens; identical to SEQ ID NO: 1242

SEQ ID NO: 4523 - protein, 36 aa, Homo sapiens; identical to SEQ ID NO: 745

SEQ ID NO: 4524 - protein, 25 aa, Homo sapiens
KLKAASEAPEEEVSLPWVHLAYQRF

SEQ ID NO: 4525 - protein, 33 aa, Homo sapiens; identical to SEQ ID NO: 19

SEQ ID NO: 4526 - protein, 33 aa, Homo sapiens; identical to SEQ ID NO: 19

SEQ ID NO: 4527 - protein, 26 aa, Homo sapiens
KLIALLANGEFHSGEQLGETLGMSRA

SEQ ID NO: 4528 - protein, 28 aa, Homo sapiens
KDLQQYVSVVVLDEVGLAEDSPKMPLKT

SEQ ID NO: 4529 - protein, 26 aa, Homo sapiens
KLIALLANGEFHSGEQLGETLGMSRA

SEQ ID NO: 4530 - protein, 31 aa, Homo sapiens
REALGGINELKVFVDLASISAGENDIDVDRV

SEQ ID NO: 4531 - protein, 56 aa, Homo sapiens; identical to SEQ ID NO: 22

SEQ ID NO: 4532 - protein, 29 aa, Homo sapiens
KQILGQLDGGSVAVLPVVDSTNQYLLDRI

SEQ ID NO: 4533 - protein, 34 aa, Homo sapiens; identical to SEQ ID NO: 857

SEQ ID NO: 4534 - protein, 29 aa, Homo sapiens
RGIDKQGALLLEQDGVIKPWMGGEISLRS

SEQ ID NO: 4535 - protein, 20 aa, Homo sapiens
KMLGHSADETIGVVHLVLRR

SEQ ID NO: 4536 - protein, 33 aa, Homo sapiens; identical to SEQ ID NO: 152

SEQ ID NO: 4537 - protein, 52 aa, Homo sapiens; identical to SEQ ID NO: 1474

SEQ ID NO: 4538 - protein, 34 aa, Homo sapiens; identical to SEQ ID NO: 67

SEQ ID NO: 4539 - protein, 25 aa, Homo sapiens
RLQHVTISQLFAPGDLPELGLEHRA

SEQ ID NO: 4540 - protein, 29 aa, Homo sapiens
KQILGQLDGGSVAVLPVVDSTNQYLLDRI

SEQ ID NO: 4541 - protein, 34 aa, Homo sapiens; identical to SEQ ID NO: 857

SEQ ID NO: 4542 - protein, 22 aa, Homo sapiens
RAALELFEQEGLAPYLPRWEKL

SEQ ID NO: 4543 - protein, 26 aa, Homo sapiens
KVFVTPQAPLEAIQAYLAGHYRVPKQ

SEQ ID NO: 4544 - protein, 35 aa, Homo sapiens; identical to SEQ ID NO: 1234

SEQ ID NO: 4545 - protein, 35 aa, Homo sapiens; identical to SEQ ID NO: 1234

SEQ ID NO: 4546 - protein, 29 aa, Homo sapiens
RGIDKQGALLLEQDGVIKPWMGGEISLRS

SEQ ID NO: 4547 - protein, 23 aa, Homo sapiens
KVFVTPQAPLEAIQAYLAGHYRV

SEQ ID NO: 4548 - protein, 23 aa, Homo sapiens
RLSAYSLGGFAAEWLSQEYFHRQ

SEQ ID NO: 4549 - protein, 23 aa, Homo sapiens
RLSAYSLGGFAAEWLSQEYFHRQ

SEQ ID NO: 4550 - protein, 24 aa, Homo sapiens
RDLYQGLLLQRVPFNVDFDKLPRH

SEQ ID NO: 4551 - protein, 33 aa, Homo sapiens; identical to SEQ ID NO: 19

SEQ ID NO: 4552 - protein, 34 aa, Homo sapiens; identical to SEQ ID NO: 67

SEQ ID NO: 4553 - protein, 17 aa, Homo sapiens
RALTEELHQKVSEEAKS

SEQ ID NO: 4554 - protein, 29 aa, Homo sapiens
RGIDKQGALLLEQDGVIKPWMGGEISLRS

SEQ ID NO: 4555 - protein, 34 aa, Homo sapiens; identical to SEQ ID NO: 857

SEQ ID NO: 4556 - protein, 34 aa, Homo sapiens; identical to SEQ ID NO: 857

SEQ ID NO: 4557 - protein, 22 aa, Homo sapiens
RVMEELPLMLLSEFSLVDKLRI

SEQ ID NO: 4558 - protein, 33 aa, Homo sapiens; identical to SEQ ID NO: 152

SEQ ID NO: 4559 - protein, 28 aa, Homo sapiens
KDLQQYVSVVVLDEVGLAEDSPKMPLKT

SEQ ID NO: 4560 - protein, 44 aa, Homo sapiens; identical to SEQ ID NO: 34

SEQ ID NO: 4561 - protein, 28 aa, Homo sapiens
KNLAFSPATMAHAFLPTMPEDLLAQARR

SEQ ID NO: 4562 - protein, 25 aa, Homo sapiens
KQGALLLEQDGVIKPWMGGEISLRS

SEQ ID NO: 4563 - protein, 33 aa, Homo sapiens; identical to SEQ ID NO: 19

SEQ ID NO: 4564 - protein, 29 aa, Homo sapiens
RGIDKQGALLLEQDGVIKPWMGGEISLRS

SEQ ID NO: 4565 - protein, 34 aa, Homo sapiens; identical to SEQ ID NO: 67

SEQ ID NO: 4566 - protein, 33 aa, Homo sapiens; identical to SEQ ID NO: 28

SEQ ID NO: 4567 - protein, 21 aa, Homo sapiens
RGLSQEGTGPPTSAGEGHSRT

SEQ ID NO: 4568 - protein, 26 aa, Homo sapiens
KVFVTPQAPLEAIQAYLAGHYRVPKQ

SEQ ID NO: 4569 - protein, 23 aa, Homo sapiens
KQNIFGPSQKVPGGEQEDAESRY

SEQ ID NO: 4570 - protein, 28 aa, Homo sapiens
RDWGVDVFTVPGKGYSLPEPIPLLNAKQ

SEQ ID NO: 4571 - protein, 23 aa, Homo sapiens
KQNIFGPSQKVPGGEQEDAESRY

SEQ ID NO: 4572 - protein, 29 aa, Homo sapiens
RGIDKQGALLLEQDGVIKPWMGGEISLRS

SEQ ID NO: 4573 - protein, 45 aa, Homo sapiens; identical to SEQ ID NO: 178

SEQ ID NO: 4574 - protein, 42 aa, Homo sapiens; identical to SEQ ID NO: 57

SEQ ID NO: 4575 - protein, 25 aa, Homo sapiens
RAPKPTLLWLQQFDTEYSFLKEVRN

SEQ ID NO: 4576 - protein, 34 aa, Homo sapiens; identical to SEQ ID NO: 857

SEQ ID NO: 4577 - protein, 34 aa, Homo sapiens; identical to SEQ ID NO: 67

SEQ ID NO: 4578 - protein, 34 aa, Homo sapiens; identical to SEQ ID NO: 857

SEQ ID NO: 4579 - protein, 28 aa, Homo sapiens
RDWGVDVFTVPGKGYSLPEPIPLLNAKQ

SEQ ID NO: 4580 - protein, 45 aa, Homo sapiens; identical to SEQ ID NO: 178

SEQ ID NO: 4581 - protein, 42 aa, Homo sapiens; identical to SEQ ID NO: 57

SEQ ID NO: 4582 - protein, 56 aa, Homo sapiens; identical to SEQ ID NO: 22

SEQ ID NO: 4583 - protein, 48 aa, Homo sapiens; identical to SEQ ID NO: 18

SEQ ID NO: 4584 - protein, 34 aa, Homo sapiens; identical to SEQ ID NO: 67

SEQ ID NO: 4585 - protein, 42 aa, Homo sapiens; identical to SEQ ID NO: 57

SEQ ID NO: 4586 - protein, 44 aa, Homo sapiens; identical to SEQ ID NO: 34

SEQ ID NO: 4587 - protein, 42 aa, Homo sapiens; identical to SEQ ID NO: 57

SEQ ID NO: 4588 - protein, 42 aa, Homo sapiens; identical to SEQ ID NO: 57

SEQ ID NO: 4589 - protein, 73 aa, Homo sapiens
MPEDLLAQARRWKGLERVHWYTCPNGHPCSVGECGRPMEQSICIDCHAPIGGIDHKPRDGFHLVKDKADRTQT

SEQ ID NO: 4590 - protein, 46 aa, Homo sapiens
EAAEPLSEPKEDQEAAELLSEPEEESERHILELEEVYDYLYQPSYR

SEQ ID NO: 4591 - DNA, 20 bp, synthetic construct
  source 1..20: mol_type = other DNA
acaatggcgtcggcctcgga

SEQ ID NO: 4592 - DNA, 20 bp, synthetic construct
  source 1..20: mol_type = other DNA
accttcgatcacagccaggt

SEQ ID NO: 4593 - DNA, 20 bp, synthetic construct
  source 1..20: mol_type = other DNA
aaagcatgttttcagcaacg

SEQ ID NO: 4594 - DNA, 20 bp, synthetic construct
  source 1..20: mol_type = other DNA
ttcaactaaggaactccggg

SEQ ID NO: 4595 - DNA, 20 bp, synthetic construct
  source 1..20: mol_type = other DNA
tcaacctcttcctctacccg

SEQ ID NO: 4596 - DNA, 20 bp, synthetic construct
  source 1..20: mol_type = other DNA
cagatccacgtcatcctgag

SEQ ID NO: 4597 - DNA, 20 bp, synthetic construct
  source 1..20: mol_type = other DNA
aggttgacacacttataacg

SEQ ID NO: 4598 - DNA, 20 bp, synthetic construct
  source 1..20: mol_type = other DNA
cagggatgaactccccacca

SEQ ID NO: 4599 - DNA, 21 bp, synthetic construct
  source 1..21: mol_type = other DNA
ccgcccaaaggagttacattc

SEQ ID NO: 4600 - DNA, 21 bp, synthetic construct
  source 1..21: mol_type = other DNA
ccgcccagaggagctatattc

SEQ ID NO: 4601 - DNA, 20 bp, synthetic construct
  source 1..20: mol_type = other DNA
gatcgcagcgaagatccaca

SEQ ID NO: 4602 - DNA, 20 bp, synthetic construct
  source 1..20: mol_type = other DNA
cagaagtacctgagctcgcc

SEQ ID NO: 4603 - DNA, 20 bp, synthetic construct
  source 1..20: mol_type = other DNA
gatcttcgctgcgatcaaca

SEQ ID NO: 4604 - DNA, 20 bp, synthetic construct
  source 1..20: mol_type = other DNA
ttaaagatgagcgggtggca

SEQ ID NO: 4605 - DNA, 20 bp, synthetic construct
  source 1..20: mol_type = other DNA
cactcctgaaggggaacgtc

SEQ ID NO: 4606 - DNA, 20 bp, synthetic construct
  source 1..20: mol_type = other DNA
accagcgtggtgatagttgg

SEQ ID NO: 4607 - DNA, 20 bp, synthetic construct
  source 1..20: mol_type = other DNA
gtcctggggacacaatgcag

SEQ ID NO: 4608 - DNA, 20 bp, synthetic construct
  source 1..20: mol_type = other DNA
gatggctttgcaagagtcgg

SEQ ID NO: 4609 - DNA, 20 bp, synthetic construct
  source 1..20: mol_type = other DNA
caggtggcaatgaagtgtgc

SEQ ID NO: 4610 - DNA, 20 bp, synthetic construct
  source 1..20: mol_type = other DNA
gagtgaccgtggtctgagtg

SEQ ID NO: 4611 - DNA, 20 bp, synthetic construct
  source 1..20: mol_type = other DNA
gaagcccttgctgtagtggt

SEQ ID NO: 4612 - DNA, 20 bp, synthetic construct
  source 1..20: mol_type = other DNA
gacgggcattcctgtcttca

SEQ ID NO: 4613 - DNA, 25 bp, synthetic construct
  source 1..25: mol_type = other DNA
atttttggaaaagggtaggttaagt

SEQ ID NO: 4614 - DNA, 20 bp, synthetic construct
  source 1..20: mol_type = other DNA
accaccttgaacggcaagaa

SEQ ID NO: 4615 - DNA, 20 bp, synthetic construct
  source 1..20: mol_type = other DNA
ctggaattgccggtccttct

SEQ ID NO: 4616 - DNA, 23 bp, synthetic construct
  source 1..23: mol_type = other DNA
tcacactctctgataaagctggg

SEQ ID NO: 4617 - DNA, 20 bp, synthetic construct
  source 1..20: mol_type = other DNA
tccattgaactgggcttccc

SEQ ID NO: 4618 - DNA, 20 bp, synthetic construct
  source 1..20: mol_type = other DNA
tagaggtaggcactgtcccc

SEQ ID NO: 4619 - DNA, 20 bp, synthetic construct
  source 1..20: mol_type = other DNA
tgttgaggtagtttcggggc

SEQ ID NO: 4620 - protein, 42 aa, Homo sapiens; identical to SEQ ID NO: 57
  SITE 34: note = Phosphorylated residue

SEQ ID NO: 4621 - protein, 45 aa, Homo sapiens; identical to SEQ ID NO: 178
  SITE 43: note = Phosphorylated residue

SEQ ID NO: 4622 - protein, 45 aa, Homo sapiens; identical to SEQ ID NO: 178
  SITE 24: note = Phosphorylated residue

SEQ ID NO: 4623 - protein, 45 aa, Homo sapiens; identical to SEQ ID NO: 178
  SITE 43: note = Phosphorylated residue

SEQ ID NO: 4624 - protein, 23 aa, Homo sapiens
  SITE 19: note = Phosphorylated residue
KHVVPLPDGKSTDFLPVDCPVRS

SEQ ID NO: 4625 - protein, 23 aa, Homo sapiens
  SITE 19: note = Phosphorylated residue
KHVVPLPDGKSTDFLPVDCPVRS

SEQ ID NO: 4626 - protein, 21 aa, Homo sapiens
  SITE 10: note = Phosphorylated residue
KSLSPQDEQCAVEEALDWRRE

SEQ ID NO: 4627 - protein, 11 aa, Homo sapiens
RLSTSSNSQRA

SEQ ID NO: 4628 - protein, 11 aa, Homo sapiens
RLSTSSNSQRA

SEQ ID NO: 4629 - protein, 52 aa, Homo sapiens
  SITE 10: note = Phosphorylated residue
  SITE 17: note = Phosphorylated residue
  SITE 18: note = Phosphorylated residue
REDYQLVMVCDGDWEHCYLPSAFSQHKVFVTPQAPLEAIQAYLAGHYRVPKQ

SEQ ID NO: 4630 - protein, 21 aa, Homo sapiens
  SITE 18: note = Phosphorylated residue
KKVGFVGISNWALDPAKMNRG

SEQ ID NO: 4631 - protein, 15 aa, Homo sapiens
RQGPRALTEELHQKV

SEQ ID NO: 4632 - protein, 56 aa, Homo sapiens; identical to SEQ ID NO: 22
  SITE 17: note = Phosphorylated residue

SEQ ID NO: 4633 - protein, 29 aa, Homo sapiens
  SITE 11: note = Phosphorylated residue
KNLSMPLELICSDEHMQGSGSLAQAVIRE

SEQ ID NO: 4634 - protein, 18 aa, Homo sapiens
  SITE 16: note = Phosphorylated residue
RENSDVKTHGPFEAVMRT

SEQ ID NO: 4635 - protein, 18 aa, Homo sapiens
  SITE 16: note = Phosphorylated residue
RENSDVKTHGPFEAVMRT

SEQ ID NO: 4636 - protein, 20 aa, Homo sapiens
  SITE 7: note = Phosphorylated residue
RGREPANEASVEYLQEVARI

SEQ ID NO: 4637 - protein, 13 aa, Homo sapiens
KPGRPHQWVFPKD

SEQ ID NO: 4638 - protein, 14 aa, Homo sapiens
RTQTGHVLGNPQRR

SEQ ID NO: 4639 - protein, 17 aa, Homo sapiens
  SITE 15: note = Phosphorylated residue
RRLLNFDTELSTKEMRN

SEQ ID NO: 4640 - protein, 17 aa, Homo sapiens
KNGKERVPILWHFLQKE

SEQ ID NO: 4641 - protein, 15 aa, Homo sapiens
RLVKFLPEILALQRD

SEQ ID NO: 4642 - protein, 38 aa, Homo sapiens; identical to SEQ ID NO: 199
  SITE 3: note = Phosphorylated residue
  SITE 32: note = Phosphorylated residue

SEQ ID NO: 4643 - protein, 34 aa, Homo sapiens; identical to SEQ ID NO: 227
  SITE 22: note = Phosphorylated residue

SEQ ID NO: 4644 - protein, 16 aa, Homo sapiens
  SITE 13: note = Phosphorylated residue
KGYSLPEPIPLLNAKQ

SEQ ID NO: 4645 - protein, 43 aa, Homo sapiens; identical to SEQ ID NO: 573

SEQ ID NO: 4646 - protein, 14 aa, Homo sapiens
  SITE 6: note = Phosphorylated residue
RVKWPNDLYLQDRK

SEQ ID NO: 4647 - protein, 32 aa, Homo sapiens; identical to SEQ ID NO: 160
  SITE 30: note = Phosphorylated residue

SEQ ID NO: 4648 - protein, 32 aa, Homo sapiens; identical to SEQ ID NO: 160

SEQ ID NO: 4649 - protein, 31 aa, Homo sapiens; identical to SEQ ID NO: 176
  SITE 29: note = Phosphorylated residue

SEQ ID NO: 4650 - protein, 17 aa, Homo sapiens
RSAEKLQLPPLERLTLD

SEQ ID NO: 4651 - protein, 13 aa, Homo sapiens
KLQLPPLERLTLD

SEQ ID NO: 4652 - protein, 30 aa, Homo sapiens
  SITE 11: note = Phosphorylated residue
RDLTPLILSNCQYQVEEGRETVQEFDLEKI

SEQ ID NO: 4653 - protein, 17 aa, Homo sapiens
RSAEKLQLPPLERLTLD

SEQ ID NO: 4654 - protein, 17 aa, Homo sapiens
RSAEKLQLPPLERLTLD

SEQ ID NO: 4655 - protein, 56 aa, Homo sapiens; identical to SEQ ID NO: 22
  SITE 30: note = Phosphorylated residue

SEQ ID NO: 4656 - protein, 33 aa, Homo sapiens; identical to SEQ ID NO: 286
  SITE 10: note = Phosphorylated residue
  SITE 15: note = Phosphorylated residue
  SITE 16: note = Phosphorylated residue

SEQ ID NO: 4657 - protein, 36 aa, Homo sapiens; identical to SEQ ID NO: 3078
  SITE 5: note = Phosphorylated residue
  SITE 8: note = Phosphorylated residue
  SITE 25: note = Phosphorylated residue

SEQ ID NO: 4658 - protein, 17 aa, Homo sapiens
RSAEKLQLPPLERLTLD

SEQ ID NO: 4659 - protein, 13 aa, Homo sapiens
KLQLPPLERLTLD

SEQ ID NO: 4660 - protein, 6 aa, synthetic construct
HHHHHH

SEQ ID NO: 4661 - protein, 46 aa, Homo sapiens; identical to SEQ ID NO: 4590
  SITE 37: note = Phosphorylated residue

SEQ ID NO: 4662 - protein, 5207 aa, Homo sapiens; identical to SEQ ID NO: 1

1. A method of inhibiting inflammatory cell death or hypoxia-induced cell death in a subject in need thereof, comprising
(i) inhibiting the RZ domain of RNF213 protein in the cells of the subject;
(ii) inhibiting a functional ATPase domain of RNF213 protein in the cells of the subject;
(iii) inhibiting RNF213 protein expression or degrading RNF213 protein in the cells of the subject;
(iv) activating the RING domain of RNF213 protein in the cells of the subject;
(v) inhibiting oligomerization of RNF213 protein in the cells of the subject; or
(vi) inhibiting an RNF213 activator in the cells of the subject.

2-6. (canceled)

7. The method of claim 1, wherein the inflammatory cell death is pyroptotic cell death.

8-13. (canceled)

14. A method of preventing or treating a vascular occlusive event or disorder in a subject in need thereof, comprising
(i) inhibiting the RZ domain of RNF213 protein in the cells of the subject;
(ii) inhibiting a functional ATPase domain of RNF213 protein in the cells of the subject;
(iii) inhibiting RNF213 protein expression or degrading RNF213 protein in the cells of the subject;
(iv) activating the RING domain of RNF213 protein in the cells of the subject;
(v) inhibiting oligomerization of RNF213 protein in the cells of the subject; or
(vi) inhibiting an RNF213 activator in the cells of the subject.

15-19. (canceled)

20. The method of claim 14 wherein the vascular occlusive event or disorder is a stroke, myocardial infarction, arterial thrombosis, atherosclerosis, peripheral arterial disease, renal vascular disease, Moyamoya disease (MMD), or Moyamoya syndrome.

21. A method of preventing or treating an autoimmune or inflammatory disease in a subject in need thereof, comprising
(i)inhibiting the RZ domain of RNF213 protein in the cells of the subject;
(ii) inhibiting a functional ATPase domain of RNF213 protein in the cells of the subject;
(iii) inhibiting RNF213 protein expression or degrading RNF213 protein in the cells of the subject;
(iv) activating the RING domain of RNF213 protein in the cells of the subject;
(v) inhibiting oligomerization of RNF213 protein in the cells of the subject; or
(vi) inhibiting an RNF213 activator in the cells of the subject.

22-26. (canceled)

27. The method of claim 21, wherein the autoimmune or inflammatory disease is Graves' disease, systemic lupus erythematosus, Sjögren's syndrome, multiple sclerosis, or rheumatoid arthritis.

28. A method of preventing or treating a disease associated with lipotoxicity in a subject in need thereof, comprising
(i) inhibiting the RZ domain of RNF213 protein in the cells of the subject;
(ii) inhibiting a functional ATPase domain of RNF213 protein in the cells of the subject;
(iii) inhibiting RNF213 protein expression or degrading RNF213 protein in the cells of the subject;
(iv) activating the RING domain of RNF213 protein in the cells of the subject;
(v) inhibiting oligomerization of RNF213 protein in the cells of the subject; or
(vi) inhibiting an RNF213 activator in the cells of the subject.

29-33. (canceled)

34. The method of claim 28, wherein the disease associated with lipotoxicity is hepatic steatosis, non-alcoholic steatohepatitis (NASH), non-alcoholic fatty liver disease (NAFLD), primary lipodystrophy, or secondary lipodystrophy.

35-55. (canceled)

56. The method of claim 1, wherein the RNF213 activator is ABL1/2 or TNK1.

57. The method of claim 56, wherein inhibiting ABL1/2 comprises administering to the subject an effective amount of asciminib, dasatinib, imatinib, AP 24149, ponatinib, ruserontinib, PD173952, bosutinib, rebastinib, olverembatinib, KW-2449, bafetinib, or nilotinib.

58. The method of claim 56, wherein inhibiting TNK1 comprises administering to the subject an effective amount of TP-5801, TP-5801 TFA, XMD8-92, CZC-25146, or CZC-25146 hydrochloride.

59. The method of claim 1, wherein degrading RNF213 protein comprises administering to the subject an effective amount of PROTAC or a molecular glue.

60. The method claim 1, wherein inhibiting RNF213 protein expression comprises administering to the subject an effective amount of an siRNA, an shRNA, an anti-sense oligonucleotide, or a site-specific nuclease.

61-84. (canceled)

85. The method of claim 1, wherein the functional ATPase domain of RNF213 protein is the 3^{rd} or 4^{th} ATPase domain.

86. (canceled)

87. The method of claim 1, wherein the subject is human.
